(19) United States
(12) Patent Application Publication
(10) Pub. No.: US 2015/0293120 A1
(43) Pub. Date: Oct. 15, 2015

(54) MARKER SEQUENCES FOR RHEUMATOID ARTHRITIS

(71) Applicant: PROTAGEN AG, Dortmund (DE)

(72) Inventors: Angelika LÜKING, Bochum (DE); Peter SCHULZ-KNAPPE, Hemmingen (DE); Heike GÖHLER, Bochum (DE); Martin GAMER, Dortmund (DE); Carmen THEEK, Herdecke (DE); Daniel CHAMRAD, Bochum (DE); Anna TELAAR, Dortmund (DE); Matthias VON DARL, Steinfurt (DE); Matthias SCHNEIDER, Düsseldorf (DE); Jessica SCHWERMANN, Isernhagen (DE)

(21) Appl. No.: 14/388,533

(22) PCT Filed: Mar. 27, 2013
(86) PCT No.: PCT/EP2013/056627

§ 371 Date: Jun. 23, 2015

(30) Foreign Application Priority Data
Mar. 27, 2012 (EP) 12161628.8
Sep. 3, 2012 (EP) 12182857.8

(51) Int. Cl. G01N 33/68

(52) U.S. Cl. CPC G01N 33/6893; G01N 2800/102; G01N 2570/00; G01N 2800/60

(57) ABSTRACT

The present invention relates to a novel method for identifying marker sequences for rheumatoid arthritis, the novel marker sequences discovered with the aid of the method, and the diagnostic use thereof. The invention also relates to diagnostic devices containing such marker sequences for rheumatoid arthritis, in particular a protein biochip or beads (pellets), and use thereof.

[0001] The present invention relates to a novel method for identifying marker sequences for rheumatoid arthritis, the novel marker sequences discovered with the aid of the method, and diagnostic use thereof. The invention also relates to diagnostic devices containing such marker sequences for rheumatoid arthritis, in particular a protein biochip or beads, and use thereof.

[0002] Protein biochips are gaining increasing industrial importance in analysis and diagnosis as well as in pharmaceutical development. Protein biochips have become established as screening tools.

[0003] Here, the rapid and highly parallel detection of a multiplicity of specifically binding analysis molecules in a single experiment is made possible. To produce protein biochips, it is necessary to have the required proteins available. In particular, protein expression libraries have been established for this purpose. High-throughput cloning of defined open reading frames is one possibility (Heyman, J. A., Cornthwaite, J., Foncerrada, L., Gilmore, J. R., Gontang, E., Hartman, K. J., Hernandez, C. L., Hood, R., Hull, H. M., Lee, W. Y., Marcil, R., Marsh, E. J., Mudd, K. M., Patino, M. J., Purcell, T. J., Rowland, J. J., Sindici, M. L. and Hoeffler, J. P. (1999) Genome-scale cloning and expression of individual open reading frames using topoisomerase I-mediated ligation. Genome Res, 9, 383-392; Kersten, B., Feilner, T., Kramer, A., Wehrmeyer, S., Possling, A., Witt, I., Zanor, M. I., Stracke, R., Lueking, A., Kreutzberger, J., Lehrach, H. and Cahill, D. J. (2003) Generation of Arabidopsis protein chip for antibody and serum screening. Plant Molecular Biology, 52, 999-1010; Reboul, J., Vaglio, P., Rual, J. F., Lamesch, P., Martinez, M., Armstrong, C. M., Li, S., Jacotot, L., Bertin, N., Janky, R., Moore, T., Hudson, J. R., Jr., Hartley, J. L., Brasch, M. A., Vandenhaute, J., Boulton, S., Endress, G. A., Jenna, S., Chevet, E., Papasotiropoulos, V., Tolias, P. P., Ptacek, J., Snyder, M., Huang, R., Chance, M. R., Lee, H., Doucette-Stamm, L., Hill, D. E. and Vidal, M. (2003) C. elegans ORFeome version 1.1: experimental verification of the genome annotation and resource for proteome-scale protein expression. Nat Genet, 34, 35-41.; Walhout, A. J., Temple, G. F., Brasch, M. A., Hartley, J. L., Lorson, M. A., van den Heuvel, S. and Vidal, M. (2000) GATEWAY recombinational cloning: application to the cloning of large numbers of open reading frames or ORFeomes. Methods Enzymol, 328, 575-592). However, such an approach is closely linked to the progress of the genome sequencing projects and the annotation of these gene sequences. In addition, the determination of the expressed sequence is not always clear due to differential splicing processes. This problem can be avoided by the use of cDNA expression libraries (Büssow, K., Cahill, D., Nietfeld, W., Bancroft, D., Scherzinger, E., Lehrach, H. and Walter, G. (1998) A method for global protein expression and antibody screening on high-density filters of an arrayed cDNA library. Nucleic Acids Research, 26, 5007-5008; Büssow, K., Nordhoff, E., Lübbert, C., Lehrach, H. and Walter, G. (2000) A human cDNA library for high-throughput protein expression screening. Genomics, 65, 1-8; Holz, C., Lueking, A., Bovekamp, L., Gutjahr, C., Bolotina, N., Lehrach, H. and Cahill, D. J. (2001) A human cDNA expression library in yeast enriched for open reading frames. Genome Res, 11, 1730-1735; Lueking, A., Holz, C., Gotthold, C., Lehrach, H. and Cahill, D. (2000) A system for dual protein expression in Pichia pastoris and Escherichia coli, Protein Expr. Purif., 20, 372-378). Here, the cDNA of a specific tissue is cloned into a bacterial or eukaryotic expression vector, such as yeast. The vectors used for the expression are generally characterised in that they carry inducible promoters that may be used to control the time of protein expression. In addition, expression vectors have sequences for what are known as affinity epitopes or affinity proteins, which on the one hand permit the specific detection of the recombinant fusion proteins by means of an antibody directed against the affinity epitope, and on the other hand render possible the specific purification via affinity chromatography (IMAC).

[0004] By way of example, the gene products of a cDNA expression library from human foetal brain tissue in the bacterial expression system Escherichia coli were arranged in high-density format on a membrane and could be successfully screened with different antibodies. It was possible to show that the proportion of full-length proteins is at least 66%. Additionally, the recombinant proteins from expression libraries could be expressed and purified in a high-throughput manner (Braun P., Hu, Y., Shen, B., Halleck, A., Koundinya, M., Harlow, E. and LaBaer, J. (2002) Proteome-scale purification of human proteins from bacteria. Proc Natl Acad Sci USA, 99, 2654-2659; Büssow (2000) supra; Lueking, A., Horn, M., Eickhoff, H., Büssow, K., Lehrach, H. and Walter, G. (1999) Protein microarrays for gene expression and antibody screening. Analytical Biochemistry, 270, 103-111). Such protein biochips based on cDNA expression libraries are disclosed in particular in WO 99/57311 and WO 99/57312. Furthermore, in addition to antigen-presenting protein biochips, antibody-presenting arrangements are likewise described (Lal et al (2002) Antibody arrays: An embryonic but rapidly growing technology, DDT, 7, 143-149; Kusnezow et al. (2003), Antibody microarrays: An evaluation of production parameters, Proteomics, 3, 254-264).

[0005] Auger et al. (2009) Annals of the Rheumatic Diseases, British Medical Association, London, GB, vol. 68, Nr. 4, S. 591-594 discloses a method for identifying IgG autoantibodies in sera of patients with rheumatoid arthritis (RA). Here, serum samples of patients with RA are examined comparatively with those of healthy control individuals on the Invitrogen ProtoArray (8268 human proteins as GST fusion proteins, purified under native conditions and spotted onto a glass slide coated with nitrocellulose). The arrays are incubated with the serum samples and examined by Alexa Fluor 647 conjugated to anti-human IgG. A panel of measured values is evaluated by Z-score, CIP (Chebyshev Inequality Precision) and CV (Coefficient of Variation). In Auger et al. the antigens peptidylarginine deiminase 4 (PAD4), protein kinase Cβ1 (PKCβ1), phosphatidylinositol-4-phosphate-5-kinase type II γ (PIP4K2C) and v raf murine sarcoma viral oncogene homologue B1 catalytic domain (BRAF) were identified using this method. Auger et al. does not disclose the diagnostic use of the identified antigens.

[0006] EP 1 731 608 A1 discloses a method for identifying “genes susceptible to RA” by gene mapping with the aid of microsatellite markers and PCR techniques. With the aid of the method the genes TNXB, NOTCH4 (chromosome 6), RAB6A, MPRL48, FLJ11848, UCP2 and UCP3 (chromosome 11) were discovered in human genomic DNA. EP 1 731 608 A1 claims a marker gene for an RA test consisting of a partial DNA sequence of one of the discovered marker genes and comprising at least one SNP in human genomic DNA. In addition, a method is disclosed for detecting RA comprising the steps of obtaining partial DNA sequences corresponding to one of the marker genes from a subject to be examined, determining the nucleotide sequence of the partial DNA sequence, and comparing the nucleotide sequence to the corresponding nucleotide sequence obtained from a normal individual. A test kit for RA comprising one of the marker genes or a primer derived therefrom, a polypeptide coded by one of the marker genes, and a screening method is also disclosed.

[0007] WO 2009/138408 A2 claims a diagnostic method, in which an autoantigen marker comprising the catalytic domains of BRAF or an antibody fragment thereof is used to detect RA, wherein, where appropriate, anti-PAD4 antibodies are also detected in the biological sample of the subject to be examined. WO 2009/138408 A2 also discloses a detection kit for detecting anti-BRAF autoantibodies, an array with autoantigen markers comprising BRAF and PAD4 for diagnosing RA, and the use of an autoantigen marker comprising BRAF for diagnosing RA, preferably in patients who are CCP negative (page 3, paragraph

[0008] In WO 2009/138408 A2 the biomarkers were identified in that serum from RA patients and controls (patients with spondylarthropathy (AS)), systemic lupus erythematosus (SLE), systemic sclerosis (SSC) and healthy individuals) were screened with the ProtoArray Human Protein Microarray (Invitrogen), wherein the detection was performed by means of anti-human IgG conjugated to Alex Fluor 647. A panel of measured values was evaluated by Z-score, CIP and CV.

[0009] WO 2007/039280 A1 claims a method for the differential diagnosis of RA by determining the concentration of anti-CCP and anti-nuclear antibodies in a sample and correlation with the diagnosis of RA. Here, the markers CRP, SAA, IL-6, 5100, osteopontin, RF, MMP-1, MMP-3, hyaluronic acid, sCD14, angiogenesis markers and products from the metabolism of bone, cartilage or synovial membrane can be used in addition. WO 2007/039280 A1 also claims the use of a panel comprising anti-CCP and ANA for the diagnosis of RA, and a test kit.

[0010] WO 2005/032328 A2 claims a method for detecting RA in a sample of a patient, wherein the amount of one or more markers selected from Table 1 (679 are specified there) or Table 2 (some of the markers from Table 1) compared to a control with normal expression level of the respective marker is determined. WO 2005/032328 A2 also discloses distinguishing between progressive and non-progressive RA with certain markers.

[0011] In WO 2005/032328 A2 the markers for RA are identified in the serum of patients by means of MS.

[0012] WO 2005/061692 A1 claims a protein microarray comprising at least two of the proteins selected from L35 protein, eukaryotic translation elongation factor 1 α. 2, NADH dehydrogenase 3 (complex I), 24-kDa sub-unit of complex I, mitotic kinesin-like protein-1, thromboxane synthase and uncoupling protein homologue, wherein the proteins are HIS-tagged and printed onto a glass slide coated with Ni²⁺. WO 2005/061692 A1 also specifies a method for screening RA with use of the specified proteins, a drug containing one of the proteins, and a kit for screening RA. In order to identify the above-mentioned proteins, it is proposed in WO 2005/061692 A1 to compare the serum of afflicted patients with that of healthy control individuals (page 6, paragraph 3).

[0013] Nicaise et al. (2008) Arthritis Research Therapy, Biomed Central LTD, GB, vol. 10, Nr. 6, S. R142-R142.7 examines the suitability of anti-MCV (mutated citrullinated vimentin) antibodies for the diagnosis of RA in CCP-negative patients and the use for monitoring during therapy with Infliximab. Here, groups of patients with RA and CCP and with RA and without CCP are compared with patients having other rheumatic diseases (psoriatic rheumatism, primary Sjögren's syndrome, ankylosis spondylitis) and healthy control individuals. The use of an array/an arrangement is not described.

[0014] Vossenaar et al. (2004) Clinical and Applied Immunology Reviews 4, 239-262 concerns the use of citrullinated autoantigens and of anti-CCP antibodies and antigens thereof as serological markers for the detection of RA. Vossenaar et al. proposes using microarray technology to analyse autoantibody profiles of RA patients (page 254, paragraph 2).

[0015] US 2007/0254300 A1 uses a yeast two-hybrid system, in order to identify anti-inflammatory compounds ([0504] to [0506]) and claims a protein complex, wherein the first protein is PAK, a fragment thereof, or a fusion protein containing this, and the second protein is ERK3, PRKAR1A, KRT23(209), PN7098, AL117237, PCNT2, PROX1, HOOK1, IGHG1, GOLGA2, KIAA0555, LRPPRC or a fragment of these proteins. US 2007/0254300 A1 also discloses a microarray comprising this protein complex and a method for discovering “modulators” of the protein complex using this microarray. A method for detecting a change in an inflammatory disease, for example RA, is also claimed, wherein the sample of a patient is examined to ascertain whether a change in the expression level of one of the proteins in Tables 1 to 82 (82 different proteins are specified here) or in the nucleotide sequence of a gene coding for the 82 proteins is determined compared with patients without this inflammatory disease.

[0016] WO 2009/030226 discloses marker sequences for rheumatoid arthritis and diagnostic use thereof as well as a method for screening potential active ingredients for rheumatoid arthritis by means of these marker sequences. A diagnostic device containing such marker sequences for rheumatoid arthritis, in particular a protein biochip, and use thereof are also disclosed.

[0017] DE 10 2007 041 656 A1 discloses the use of marker sequences for diagnosing RA, methods for diagnosing RA with use of these marker sequences, methods for stratification, an arrangement of marker sequences, an assay/protein biochip, the use of the arrangement, diagnostic agents comprising the marker sequences, a target for treatment and therapy, and the use of the marker sequences to carry out an apheresis.

[0018] The RA-specific expression clones were obtained in DE 10 2007 041 656 A1 by screening 10 or more patient samples individually against a cDNA expression library and were identified by comparison with 10 or more healthy samples. FIG. 1 shows the differential screening between two protein biochips, one from a cDNA expression bank of a patient and one from a healthy test subject. The differential clones are detected by means of fluorescence labelling and evaluated by means of bioinformatics.

[0019] There is still a pressing need for indication-specific diagnostic devices for rheumatoid arthritis.

[0020] The object of the present invention is therefore to discover improved marker sequences for rheumatoid arthritis and to specify a diagnostic use thereof.

[0021] The provision of specific marker sequences allows a reliable diagnosis and stratification of patients with rheumatoid arthritis.

[0022] In a two-stage method comprising firstly the selection of marker sequence candidates with the aid of protein biochips and the subsequent validation thereof by means of beads, highly specific marker sequences are discovered for rheumatoid arthritis.

[0023] The invention relates to a method for identifying marker sequences for rheumatoid arthritis (RA), comprising the steps of:
[0024] a) selecting marker sequence candidates by screening protein biochips representing a cDNA expression library with at least 10 patient samples and at least 10 samples of healthy individuals, wherein each sample is measured individually and marker sequence candidates for RA are selected by a comparison of the results of the screens obtained with the RA patient samples and the results of the screens obtained with the samples of healthy individuals,
[0025] b) producing the proteins and/or partial proteins (peptides) coded by the marker sequence candidates by expression of the cDNA of the marker sequence candidates,
[0026] c) producing beads to which one or more of the proteins and/or partial proteins (peptides) produced in step b) are coupled,
[0027] d) validating the marker sequence candidates coupled to the beads by means of samples from patients with RA and samples from healthy individuals in that marker sequences for RA demonstrate an interaction with the samples from patients with RA and demonstrate a comparatively lower or no interaction with the samples from healthy individuals, wherein the marker sequences SEQ ID No. 1 to 182, SEQ ID. No. 183 to 273, SEQ ID No. 274 to 313 and SEQ ID No. 314 to SEQ ID No. 333 are obtained.

[0028] In the field of microarrays flat substrates are used, to which marker sequences or sequences to be examined are bound. In protein biochips the marker sequences to be examined or the sequences binding to these marker sequences are immobilised on a solid, flat support. An alternative arrangement of marker sequences or sequences to be examined is possible on beads, which therefore differ inter alia in view of their sensitivity and specificity from conventional microarrays. Bead arrays are created for example by impregnating pellets either with different concentrations of fluorescent dye or for example by barcode technology. The pellets can be addressed and can be used to identify specific binding events that occur on their surface. Bead technology is based on microscopically small spherical pellets or platelets, which are referred to as microspheres or beads. These beads can serve analogously to ELISA and Western Blot as solid phase for biochemical detection reactions. A wide range of different bead types are available, which for example differ in their fluorescence shade and each of which carries its own specific detection reagent on the surface. In this way, an accordingly large number of different detection reactions can be carried out simultaneously in a very small sample volume. With bead arrays specific interactions between two defined biochemical compounds can be detected. Compared with conventional microarrays, the bead-based validation is characterised by a particularly high sensitivity and specificity. With the two-stage method according to the invention and the use of beads for validation, marker sequences for RA can be identified that differ in terms of their sensitivity and specificity from the previously known marker sequences. The two-stage method according to the invention has not been described previously in the prior art. In the method according to the invention other biomarkers can additionally be coupled to the beads. Marker sequences with specific specificity can thus be obtained. By way of example, marker sequences with which sub-groups of patients within the indication RA can be diagnosed are obtained.

[0029] In one embodiment of the method steps c) and d) are performed in the presence of CCP (cytochrome c peroxidase). The marker sequences validated in the presence of CCP are more sensitive with respect to the diagnosis of rheumatoid arthritis than CCP. With the aid of the marker sequences validated in the presence of CCP, a sub-group of RA patients can be diagnosed. When performing the validation in the presence of CCP, the marker sequences SEQ ID No. 29 to 79, SEQ ID No. 120 to 170, SEQ ID No. 211 to 261, SEQ ID No. 274, SEQ ID No. 276, SEQ ID No. 278, SEQ ID No. 285 to 288, SEQ ID No. 291, SEQ ID No. 294, SEQ ID No. 296, SEQ ID No. 298, SEQ ID No. 305 to 308, SEQ ID No. 311, SEQ ID No. 314, SEQ ID No. 316, SEQ ID No. 318, SEQ ID No. 325 to 328, and SEQ ID No. 331 are obtained.

[0030] The invention relates to a method for identifying marker sequences for rheumatoid arthritis (RA) comprising the steps of:
[0031] a) selecting marker sequence candidates by screening protein biochips representing a cDNA expression library with at least 10 patient samples and at least 10 samples of healthy individuals, wherein each sample is measured individually and marker sequence candidates for RA are selected by a comparison of the results of the screens obtained with the RA patient samples and the results of the screens obtained with the samples of healthy individuals,
[0032] b) producing the proteins and/or partial proteins (peptides) coded by the marker sequence candidates by expression of the cDNA of the marker sequence candidates,
[0033] c) producing beads to which one or more of the proteins and/or partial proteins (peptides) produced in step b) are coupled, wherein CCP (cytochrome c peroxidase) is also coupled to the beads,
[0034] d) validating the marker sequence candidates coupled to the beads from c) by means of samples from patients with RA and samples from healthy individuals in that marker sequences for RA demonstrate an interaction with the samples from patients with RA and demonstrate a comparatively lower or no interaction with the samples from healthy individuals, wherein the marker sequences SEQ ID No. 29 to 79, SEQ ID No. 120 to 170, SEQ ID No. 211 to 261, SEQ ID No. 274, SEQ ID No. 276, SEQ ID No. 278, SEQ ID No. 285 to 288, SEQ ID No. 291, SEQ ID No. 294, SEQ ID No. 296, SEQ ID No. 298, SEQ ID No. 305 to 308, SEQ ID No. 311, SEQ ID No. 314, SEQ ID No. 316, SEQ ID No. 318, SEQ ID No. 325 to 328, and SEQ ID No. 331 are obtained.

[0035] One embodiment of the method according to the invention is characterised in that an interaction between marker sequence candidates and the samples in method step d) is detected by means of a fluorescence signal, wherein the intensity of the fluorescence signal correlates with the intensity of the interaction.

[0036] The invention also relates to a marker sequence for rheumatoid arthritis obtainable by a method according to the invention, wherein the marker sequence is selected from the group of sequences SEQ ID No. 1 to 182 and SEQ ID. No. 274 to 313, a sequence homologous to the sequences SEQ ID No. 1 to 182 or SEQ ID No. 274 to 313 or a partial sequence of SEQ ID No. 1 to 182 or SEQ ID. No. 274 to 313 or a protein coded by SEQ ID No. 1 to 182 or SEQ ID. No. 274 to 313 or a protein coded by a partial sequence of SEQ ID No. 1 to 182 or SEQ ID. No. 274 to 313 or a protein coded by a homologous sequence of SEQ ID No. 1 to 182 or SEQ ID. No. 274 to 313 and a genomic sequence comprising one of the sequences SEQ ID No. 1 to 182 or SEQ ID. No. 274 to 313.

[0037] The invention also relates to a marker sequence for rheumatoid arthritis in CCP-negative patients obtainable by a method according to the invention, wherein the marker sequence is selected from the group of sequences SEQ ID No. 29 to 79, SEQ ID No. 274, SEQ ID No. 276, SEQ ID No. 278, SEQ ID No. 285 to 288, SEQ ID No. 291 or SEQ ID. No. 120 to 170, SEQ ID No. 294, SEQ ID No. 296, SEQ ID No. 298, SEQ ID No. 305 to 308, SEQ ID No. 311, a sequence homologous to the sequences SEQ ID No. 29 to 79, SEQ ID No. 274, SEQ ID No. 276, SEQ ID No. 278, SEQ ID No. 285 to 288, SEQ ID No. 291 or SEQ ID No. 120 to 170, SEQ ID No. 294, SEQ ID No. 296, SEQ ID No. 298, SEQ ID No. 305 to 308, SEQ ID No. 311 or a partial sequence of SEQ ID No. 29 to 79, SEQ ID No. 274, SEQ ID No. 276, SEQ ID No. 278, SEQ ID No. 285 to 288, SEQ ID No. 291 or SEQ ID. No. 120 to 170, SEQ ID No. 294, SEQ ID No. 296, SEQ ID No. 298, SEQ ID No. 305 to 308, SEQ ID No. 311 or a protein coded by SEQ ID No. 29 to 79, SEQ ID No. 274, SEQ ID No. 276, SEQ ID No. 278, SEQ ID No. 285 to 288, SEQ ID No. 291 or SEQ ID. No. 120 to 170, SEQ ID No. 294, SEQ ID No. 296, SEQ ID No. 298, SEQ ID No. 305 to 308, SEQ ID No. 311 or a protein coded by a partial sequence of SEQ ID No. 29 to 79, SEQ ID No. 274, SEQ ID No. 276, SEQ ID No. 278, SEQ ID No. 285 to 288, SEQ ID No. 291 or SEQ ID. No. 120 to 170, SEQ ID No. 294, SEQ ID No. 296, SEQ ID No. 298, SEQ ID No. 305 to 308, SEQ ID No. 311 or a protein coded by a homologous sequence of SEQ ID No. 29 to 79, SEQ ID No. 274,

[0038] SEQ ID No. 276, SEQ ID No. 278, SEQ ID No. 285 to 288, SEQ ID No. 291 or SEQ ID. No. 120 to 170, SEQ ID No. 294, SEQ ID No. 296, SEQ ID No. 298, SEQ ID No. 305 to 308, SEQ ID No. 311 or a genomic sequence comprising one of the sequences SEQ ID No. 29 to 79, SEQ ID No. 274, SEQ ID No. 276, SEQ ID No. 278, SEQ ID No. 285 to 288, SEQ ID No. 291 or SEQ ID. No. 120 to 170, SEQ ID No. 294, SEQ ID No. 296, SEQ ID No. 298, SEQ ID No. 305 to 308, or SEQ ID No. 311.

[0039] The invention also relates to a marker sequence for rheumatoid arthritis obtainable by a method according to the invention, wherein the marker sequence is selected from the group of sequences SEQ ID No. 183 to 273, SEQ ID No. 314 to 333, in particular SEQ ID No. 211 to 261, SEQ ID No. 314, SEQ ID No. 316, SEQ ID No. 318, SEQ ID No. 325 to 328, and SEQ ID No. 331.

[0040] The invention also relates to the use of one or more marker sequence(s) according to the invention for the diagnosis of rheumatoid arthritis.

[0041] One embodiment concerns the use according to the invention, wherein the marker sequence(s) is/are determined on or from a patient to be examined.

[0042] One embodiment concerns the use according to the invention, characterised in that 2 or 3, preferably 4 or 5, particularly preferably 6, 7 or 8 or more different marker sequences, for example 10 to 20 or 30 or more different marker sequences, are determined on or from a patient to be examined.

[0043] One embodiment concerns the use according to the invention, characterised in that the marker sequence(s) is/are applied to a solid support, wherein the solid support is selected from filters, membranes, wafers, for example silicon wafers, glass, metal, plastic, chips, mass spectrometry targets, matrices, and beads, for example magnetic, coated or labelled beads, such as fluorophore-labelled beads or Luminex beads.

[0044] The invention also relates to a method for diagnosing rheumatoid arthritis, wherein

a.) at least one marker sequence according to the invention is applied to a solid support, preferably to a bead and
b.) is brought into contact with bodily fluid or tissue sample of a patient and
c.) an interaction of the bodily fluid or of the tissue sample with the marker sequence from a.) is detected.

[0045] Such an interaction can be detected for example by a probe, in particular by an antibody.

[0046] The invention also relates to a method for stratification, in particular for risk stratification, or for therapy management of a patient with rheumatoid arthritis, wherein at least one marker sequence according to the invention is used in order to examine a sample from the patient.

[0047] One embodiment concerns a method according to the invention for diagnosing rheumatoid arthritis, wherein the stratification or the therapy management includes decisions regarding the treatment and therapy of the patient, in particular the hospitalisation of the patient, the use, efficacy and/or dosage of one or more drugs, a therapeutic measure or the monitoring of the course of a disease and the course of therapy, aetiology or classification of a disease, inclusive of prognosis.

[0048] The invention also relates to an arrangement comprising or consisting of one or more marker sequence(s) according to the invention.

[0049] The invention also relates to an assay or protein array comprising an arrangement according to the invention.

[0050] The invention also relates to the use of an arrangement according to the invention or of an assay or protein array according to the invention for identifying and/or characterising a substance for rheumatoid arthritis containing means for detecting binding success, characterised in that an arrangement or an assay or protein array is brought into contact with a.) at least one substance to be examined and b.) binding success is detected.

[0051] The invention also relates to a diagnostic agent for the diagnosis of rheumatoid arthritis containing at least one marker sequence according to the invention and where appropriate further auxiliaries and additives.

[0052] The invention also relates to a target for the treatment or therapy of rheumatoid arthritis, wherein the target is selected from the marker sequences according to the invention.

[0053] The invention also relates to the use of one or more marker sequence(s) according to the invention as affinity material for carrying out an apheresis or blood washing for patients with rheumatoid arthritis. Here, an arrangement comprising one or more marker sequences according to the invention is preferably used as affinity material for carrying out the apheresis or blood washing, wherein substances from bodily fluids from a patient with rheumatoid arthritis, such as blood or plasma, bind to the marker sequences according to the invention and consequently can be removed selectively from the bodily fluid. Corresponding devices are known accordingly, such as chromatography devices containing beads, balls or chromatographic material, for example in a column, which comprise the marker sequences according to the invention and therefore can remove (auto)antibodies selectively, for example.

[0054] The invention also relates to the use of at least one marker sequence according to the invention for identifying a sub-group of patients within the group of patients with rheumatoid arthritis, wherein the patients in the sub-group cannot be identified by means of the marker CCP and/or cannot be identified with the markers known in the prior art or marker sequences for rheumatoid arthritis.

[0055] The invention therefore relates to the use of marker sequences for the diagnosis of rheumatoid arthritis, wherein at least one marker sequence selected from the group of marker sequences SEQ ID No. 1 to 91 or SEQ ID No. 274 to 293 and/or SEQ ID No. 92 to 182 or SEQ ID No. 294 to 313 and/or the genomic sequences comprising one of the sequences SEQ ID No. 1 to 182 or SEQ ID No. 274 to 313 and/or a protein coded by the sequences SEQ ID No. 1 to 182 or SEQ ID. No. 274 to 313 or a partial sequence or a homologue of the sequences SEQ ID No. 1 to 182 or SEQ ID No. 274 to 313 or a protein coded by the partial sequence or the homologous sequence is determined on or from a patient to be examined, and wherein the marker sequence(s) is/are identified by a method according to the invention.

[0056] A particular embodiment of the method according to the invention comprises the steps of
[0057] a) identifying marker sequence candidates by differential screening with protein biochips from a cDNA expression bank of a patient with rheumatoid arthritis and from a test subject without rheumatoid arthritis,
[0058] b) expressing the marker sequence candidates for production of the coded proteins and/or partial proteins (peptides),
[0059] c) producing Luminex beads, to which one or more of the proteins and/or partial proteins (peptides) produced in step b) are coupled, wherein, where appropriate, biomarkers already known for rheumatoid arthritis, for example CCP (cytochrome c peroxidase), are coupled to the Luminex beads,
[0060] d) validating the marker sequence candidates by means of samples from patients with rheumatoid arthritis and test subjects without rheumatoid arthritis, wherein the validation is performed, where appropriate, in the presence of the biomarkers already known for rheumatoid arthritis, for example CCP.

[0061] A preferred embodiment of the invention concerns the use of marker sequences according to the invention for the diagnosis of rheumatoid arthritis in patients that are CCP negative, wherein at least one marker sequence selected from the group of marker sequences SEQ ID No. 29 to 79 and/or SEQ ID No. 120 to 170 and/or the genomic sequences comprising one of the sequences SEQ ID No. 29 to 79 or 120 to 170 and/or a protein coded by the sequences SEQ ID No. 29 to 79 or 120 to 170 or a partial sequence or a homologue of the sequences SEQ ID No. 29 to 79 or SEQ ID No. 120 to 170 or a protein coded by the partial sequence or the homologue sequence is determined on or from a patient to be examined.

[0062] The marker sequences validated in the presence of CCP are more sensitive with respect to the diagnosis of rheumatoid arthritis than CCP. A sub-group of patients that cannot be identified with the aid of the marker CCP already known for rheumatoid arthritis can be identified and/or monitored in this way. With the aid of these marker sequences, rheumatoid arthritis can also be diagnosed in an earlier stage than with CCP.

[0063] A further particular embodiment of the invention relates to the use of marker sequences according to the invention for the diagnosis of rheumatoid arthritis at an early stage of RA, wherein at this early stage RA cannot yet be detected by means of CCP, and wherein at least one marker sequence selected from the group of marker sequences SEQ ID No. 29 to 79 and/or SEQ ID No. 120 to 170 and/or the genomic sequences comprising one of the sequences SEQ ID No. 29 to 79 or 120 to 170 and/or a protein coded by the sequences SEQ ID No. 29 to 79 or 120 to 170 or a partial sequence or a homologue of the sequences SEQ ID No. 29 to 79 or SEQ ID No. 120 to 170 or a protein coded by the partial sequence or the homologous sequence is determined on or from a patient to be examined.

[0064] A further embodiment of the invention concerns the use of the marker sequence(s) according to the invention for the diagnosis of rheumatoid arthritis, characterised in that the determination is performed by means of in-vitro diagnosis.

[0065] A further embodiment of the invention concerns diagnostic agents for the diagnosis of rheumatoid arthritis containing at least one marker sequence selected from the group of marker sequences SEQ ID No. 1 to 91 or SEQ ID No. 274 to 293 and/or SEQ ID No. 92 to 182 or SEQ ID No. 294 to 313 and/or the genomic sequences comprising one of the sequences SEQ ID No. 1 to 182 or SEQ ID No. 274 to 313 and/or a protein coded by the sequences SEQ ID No. 1 to 182 or SEQ ID. No. 274 to 313 or a partial sequence or a homologue of the sequences SEQ ID No. 1 to 182 or SEQ ID No. 274 to 313 or a protein coded by the partial sequence or the homologous sequence, wherein the marker sequence(s) was/were identified using a method comprising the steps of
[0066] a) selecting marker sequence candidates by screening protein biochips representing a cDNA expression library with at least 10 patient samples and at least 10 samples of healthy individuals, wherein each sample is measured individually and marker sequence candidates for RA are selected by a comparison of the results of the screens obtained with the RA patient samples and the results of the screens obtained with the samples of healthy individuals,
[0067] b) producing the proteins and/or partial proteins (peptides) coded by the marker sequence candidates by expression of the cDNA of the marker sequence candidates,
[0068] c) producing beads to which one or more of the proteins and/or partial proteins (peptides) produced in step b) and where appropriate CCP are coupled,
[0069] d) validating the marker sequence candidates coupled to the beads by means of samples from patients with RA and samples from healthy individuals in that marker sequences for RA demonstrate an interaction with the samples from patients with RA and demonstrate a comparatively lower or no interaction with the samples from healthy individuals, wherein the marker sequences SEQ ID No. 1 to 182, SEQ ID. No. 183 to 273, SEQ ID No. 274 to 313 and SEQ ID No. 314 to SEQ ID No. 333, or in the presence of CCP the marker sequences SEQ ID No. 29 to 79, SEQ ID No. 120 to 170, SEQ ID No. 211 to 261, SEQ ID No. 274, SEQ ID No. 276, SEQ ID No. 278, SEQ ID No. 285 to 288, SEQ ID No. 291, SEQ ID No. 294, SEQ ID No. 296, SEQ ID No. 298, SEQ ID No. 305 to 308, SEQ ID No. 311, SEQ ID No. 314, SEQ ID No. 316, SEQ ID No. 318, SEQ ID No. 325 to 328, and SEQ ID No. 331 are obtained.

[0070] The marker sequences according to the invention were able to be identified by means of differential screening of samples from healthy test subjects with patient samples with rheumatoid arthritis. The marker sequences according to the invention were then expressed and, following coupling of the expressed marker sequence candidates to Luminex beads, validated with the aid of the Luminex beads, partly by comparison with known biomarkers for rheumatoid arthritis and as described in the practical examples. Highly specific marker sequences could thus be identified for rheumatoid arthritis.

[0071] “Beads” (pearls, pellets, originally also referred to as latex particles) designate what are known as microspheres or microparticles, which are used as supports for biomolecules in tests and assays. Uniform (approximately equally sized) microparticles that are produced by special chemical methods are required for tests and assays. These methods are known to a person skilled in the art. Beads for different applications are also commercially available (for example from the company Progen Biotechnik GmbH). Beads may consist of different materials, for example glass, polystyrene, PMMA and different other polymers, partly also copolymers. Beads can be labelled with different dyes or dye mixtures and can be provided with coatings. Biomolecules can be coupled to the surface of beads. Different coupling methods are available for this purpose and are known to a person skilled in the art, for example adsorption or covalent coupling. The surface of the beads can be modified, such that a directed coupling of the biomolecules on the bead surface, for example in conjunction with spacers, tags or special modifications, is possible, and whereby the analytical sensitivity can be further increased.

[0072] The term “rheumatoid arthritis (RA)” is defined for example by Pschyrembel, de Gruyter, 261^{st} edition (2007), Berlin. In accordance with the invention “juvenile idiopathic arthritis” (ICD-10: M08.-. abb: JIA. earlier synonyms: juvenile rheumatoid arthritis, juvenile chronic arthritis, Still's disease or popular name: child's rheumatism) is the collective term for a series of diseases primarily affecting the joints (arthritis) of rheumatic origin in childhood (juvenile) (definition for example according to Pschyrembel, de Gruyter, 261^{st} edition (2007), Berlin). This is a polygenic disease that can be diagnosed particularly advantageously by means of the marker sequences according to the invention, preferably SEQ ID No. 1 to 333.

[0073] In a further embodiment at least 2 to 5 or 10, preferably 30 to 50 marker sequences or 50 to 100 or more marker sequences are determined on or from a patient to be examined.

[0074] In a further embodiment of the invention the marker sequences according to the invention can also be combined, supplemented, consolidated or expanded with known biomarkers for this indication.

[0075] In a preferred embodiment the marker sequences are determined outside the human body and the determination is performed in an ex vivo/in vitro diagnosis.

[0076] A further object of the invention is therefore also to provide a diagnostic device or an assay, in particular a protein biochip, that allows a diagnosis or examination for rheumatoid arthritis.

[0077] In the sense of this invention, “diagnosis” means the positive determination of rheumatoid arthritis by means of the marker sequences according to the invention as well as the assignment of the patients to the indication rheumatoid arthritis. The term diagnosis includes the medical diagnostics and examinations in this regard, in particular in-vitro diagnostics and laboratory diagnostics, and also proteomics and nucleic acid blotting. Further tests may be necessary to be sure and to exclude other diseases. The term diagnosis therefore also includes the differential diagnosis of rheumatoid arthritis by means of the marker sequences according to the invention, and the prognosis in the case of determined rheumatoid arthritis.

[0078] The invention also relates to a method for the stratification, in particular risk stratification and/or therapy management of a patient with rheumatoid arthritis, for example in a patient with a very early stage of RA or RA that cannot be detected by means of the marker CCP, wherein at least one marker sequence according to the invention is determined on a patient to be examined. The stratification of the patient with rheumatoid arthritis in new or established sub-groups within the disease rheumatoid arthritis is also included, as well as the expedient selection of patient groups for the clinical development of new therapeutic agents or the selection for therapy with certain active agents. The term therapy management also includes the division of patients into responders and non-responders in respect of a therapy or the course of a therapy.

[0079] In the sense of this invention, “stratification or therapy management” means that the method according to the invention renders possible decisions for the treatment and therapy of the patient, whether it is the hospitalisation of the patient, the use, efficacy and/or dosage of one or more drugs, a therapeutic measure, or the monitoring of the course of a disease and the course of therapy or aetiology or classification of RA, for example into a new or existing sub-type, or the differentiation of RA and patients thereof.

[0080] In a further embodiment of the invention, the term “stratification” in particular includes the risk stratification with the prognosis of an “outcome” of a negative health event.

[0081] Within the scope of this invention, the term “patient” is understood to mean any test subject (human or mammal), with the provision that the test subject is tested for rheumatoid arthritis.

[0082] The term “marker sequences” in the sense of this invention means that the nucleic acid sequence, for example the mRNA, cDNA or the polypeptide or protein obtainable therefrom are significant for rheumatoid arthritis. By way of example the mRNA or cDNA or the polypeptide or protein obtainable therefrom can interact with substances from the bodily fluid or tissue sample of a patient with rheumatoid arthritis (for example antigen (epitope)/antibody (paratope) interaction).

[0083] In the sense of the invention “wherein at least one marker sequence selected from the group of marker sequences SEQ ID No. 1 to 182 or SEQ ID No. 274 to 313, the genomic sequences comprising one of the sequences SEQ ID No. 1 to 182 or SEQ ID No. 274 to 313, or a protein coded by the sequences SEQ ID No. 1 to 182 or SEQ ID. No. 274 to 313 or a partial sequence or a homologue of the sequences SEQ ID No. 1 to 182 or SEQ ID No. 274 to 313 or a protein coded by the partial sequence or the homologous sequence is determined on or from a patient to be examined” means that an interaction between the bodily fluid or the tissue sample of a patient and the marker sequence(s) according to the invention is detected. Such an interaction is, for example, a binding, in particular a binding substance at least at one of the marker sequences according to the invention, or in the case of a cDNA is the hybridisation with a suitable substance under selected conditions, in particular stringent conditions (for example as defined typically in J. Sambrook, E. F. Fritsch, T. Maniatis (1989), Molecular cloning: A laboratory manual, 2nd Edition, Cold Spring Harbor Laboratory Press, Cold Spring Habor, USA or Ausubel, “Current Protocols in Molecular Biology”, Green Publishing Associates and Wiley Interscience, N.Y. (1989)). One example for stringent hybridisation conditions is: hybridisation in 4×SSC at 65° C. (alternatively in 50% formamide and 4×SSC at 42° C.), followed by a number of washing steps in 0.1×SSC at 65° C. for a total of about one hour. One example for less stringent hybridisation conditions is hybridisation in 4×SSC at 37° C., followed by a number of washing steps in 1×SSC at room temperature.

[0084] Such substances, in accordance with the invention, are part of a bodily fluid, in particular blood, whole blood, blood plasma, blood serum, patient serum, urine, cerebrospinal fluid, synovial fluid, or a tissue sample of the patient.

[0085] In a further embodiment of the invention the marker sequences according to the invention can be present in the examined test subjects in a significantly higher or lower expression rate or concentration compared with the expression rate or concentration of the marker sequence in question in a healthy individual or in a test subject without RA. The increased or reduced expression rate or concentration is an indication of rheumatoid arthritis and the diagnosis RA. The relative expression rates diseased/healthy of the marker sequences according to the invention can be determined for example by means of proteomics or nucleic acid blotting.

[0086] The marker sequences according to the invention, in a further embodiment of the invention, have an identification signal, which is addressed to the substance to be bound (for example antibody, nucleic acid). In accordance with the invention, the recognition signal for a protein is preferably an epitope and/or paratope and/or hapten, and for a cDNA is preferably a hybridisation or binding region. In a particularly preferred embodiment of the invention the marker sequences according to the invention identify autoantibodies that are specific for RA or that are formed and/or are formed to an increased or reduced degree with the onset and the development of the RA disease. Two or more marker sequences according to the invention can be used to detect autoantibody profiles or changes in autoantibody profiles during therapy or during the course of the disease or to monitor such changes within the scope of follow-up care.

[0087] The marker sequences according to the invention SEQ ID No. 1 to 91 and 274 to 293 are specified in Table 7 and can be unambiguously identified (see RefSeq Accession or GI Accession) by the respective cited database entries (also by means of Internet: http://www.ncbi.nlm.nih.gov/).

[0088] The invention therefore also relates to the full-length sequences of the marker sequences according to the invention and the marker sequences as defined in the tables via the known database entries and also the marker sequences specified in the accompanying sequence protocol.

[0089] The invention furthermore likewise includes analogous embodiments of the marker sequences, in particular of the nucleic acid sequences SEQ ID No. 1 to 182 and SEQ ID No. 274 to 313 and the protein sequences SEQ ID No. 183 to 273 and SEQ ID No. 314 to 333, in particular the nucleic acid sequences SEQ ID No. 29 to 79 and SEQ ID No. 120 to 170, SEQ ID No. 274, SEQ ID No. 276, SEQ ID No. 278, SEQ ID No. 285 to 288, SEQ ID No. 291, SEQ ID No. 294, SEQ ID No. 296, SEQ ID No. 298, SEQ ID No. 305 to 308, SEQ ID No. 311, and the protein sequences SEQ ID No. 211 to 261, SEQ ID No. 314, SEQ ID No. 316, SEQ ID No. 318, SEQ ID No. 325 to 328, SEQ ID No. 331 as presented in the claims for example. The clone sequences according to the invention SEQ ID No. 1 to 91 and SEQ ID No. 274 to 293 are partial sequences, at least with high homology, of the marker sequences according to the invention SEQ ID No. 92 to 182 and SEQ ID No. 294 to 313. The marker sequences SEQ ID No. 29 to 79, SEQ ID No. 274, SEQ ID No. 276, SEQ ID No. 278, SEQ ID No. 285 to 288, SEQ ID No. 291 and the proteins coded by these marker sequences are particularly preferred.

[0090] In a further embodiment of the invention marker sequences are preferred that have P-values less than or equal to 0.006, preferably less than or equal to 0.001 or less than or equal to 0.0001, particularly preferably less than or equal to 0.00001 (see FIG. 1, Tables 8 and 8a). In another embodiment of the invention the marker sequences SEQ ID No. SEQ ID No. 4 to 15, partial sequences and homologues of SEQ ID No. 4 to 15, and also the peptides/proteins coded thereby are preferred, since these marker sequences have particularly suitable P-values. The P-value specifies the likelihood with which a match has been found in the database. For example, see http://www.ncbi.nlm.nih.gov/books/NBK62051/for a definition of the P-value.

[0091] In a further embodiment of the invention homologues of the marker sequences according to the invention are included. In particular, these are homologues having an identity of 70%, 80% or 85%, preferably 90%, 91%, 92%, 93%, 94% or 95% identity, in particular 96%, 97%, 98%, 99% or more identity, with the marker sequences according to the invention and suitable for the use according to the invention—the detection of rheumatoid arthritis (“homologues” or homologous marker sequences). Homologues can be protein sequences or nucleic acid sequences.

[0092] Partial sequences are sequences that comprise 50 to 100 nucleotides or amino acids, preferably 70-120 nucleotides or amino acids, particularly preferably 100 to 200 nucleotides or amino acids of one of the marker sequences SEQ ID No. 1 to 333.

[0093] In accordance with the invention the marker sequences also comprise modifications of the nucleotide sequence, for example of the cDNA sequence and the corresponding amino acid sequence, such as chemical modification, such as citrullination, acetylation, phosphorylation, glycosylation or polyA strand and further modifications known accordingly to a person skilled in the art.

[0094] In a further embodiment the respective marker sequence can be represented in different amounts in one or more regions on a solid support, for example a bead. This allows a variation of the sensitivity. The regions may each comprise a totality of marker sequences, i.e. a sufficient number of different marker sequences, in particular 2 to 5 or 10 or more marker sequences, and where appropriate further nucleic acids and/or proteins, in particular biomarkers. However, at least 96 to 25,000 (numerically) or more different or identical marker sequences and further nucleic acids and/or proteins, in particular biomarkers, are preferred. Furthermore, more than 2,500 different or identical marker sequences are preferred, particularly preferably 10,000 or more, and where appropriate further nucleic acids and/or proteins, in particular biomarkers.

[0095] The invention also relates to an arrangement of marker sequences containing at least one marker sequence of a cDNA selected from the group SEQ ID No. 92 to 182 and 294 to 313 or in each case a protein coded thereby. The arrangement preferably contains at least 2 to 5 or 10, preferably 30 to 50 marker sequences or 50 to 100 or more marker sequences.

[0096] Within the scope of this invention, “arrangement” is synonymous with “array”, and, if this “array” is used to identify substances to be bound on marker sequences, this is to be understood to be an “assay” or a diagnostic device. In a preferred embodiment the arrangement is designed such that the marker sequences represented on the arrangement are present in the form of a grid on a solid support. Furthermore, those arrangements are preferred that permit a high-density arrangement of marker sequences, and the marker sequences are spotted. Such high-density spotted arrangements are disclosed for example in WO 99/57311 and WO 99/57312 and can be used advantageously in a robot-assisted automated high-throughput method.

[0097] Within the scope of this invention, however, the term “assay” or diagnostic device likewise comprises those embodiments of a device such as ELISA (for example individual wells of a microtitre plate are coated with the marker sequences or combinations or marker sequences according to the invention, and where appropriate are applied to the individual wells of the microtitre plate in a robot-assisted manner; examples include diagnostic ELISA kits from the company Phadia or “Searchlight” Multiplex ELISA kits from the company Pierce/Thermo Fisher Scientific), bead-based assay (spectrally distinguishable bead populations are coated with marker sequences/combinations of marker sequences. The patient sample is incubated with this bead population and bound (auto) antibodies are detected by means of a further fluorescence-labelled secondary antibody or a detection reagent by measuring the fluorescence; for example Borrelia IgG kit or Athena Multilyte from the company Multimetrix), line assay (marker sequences or combinations of marker sequences according to the invention are immobilised in a robot-assisted manner on membranes, which are examined or incubated with the patient sample; example “Euroline” from the company Euroimmun AG), Western Blot (example “Euroline-WB” from the company Euroimmun AG), and immunochromatographic methods (for example what are known as lateral flow immunoassays; marker sequences or combinations of marker sequences are immobilised on test strips (membranes, U.S. Pat. No. 5,714,389 and many others); example “One Step HBsAg” test device from Acon Laboratories) or similar immunological single or multiplex detection methods.

[0098] The marker sequences of the arrangement are fixed on a solid support, but are preferably spotted or immobilised or printed on, that is to say applied in a reproducible manner. One or more marker sequences can be present multiple times in the totality of all marker sequences and may be present in different quantities based on a spot. Furthermore, the marker sequences can be standardised on the solid support (for example by means of serial dilution series of, for example, human globulins as internal calibrators for data normalisation and quantitate evaluation).

[0099] The invention therefore concerns an assay or protein biochip or one or more beads (bead-based assay) consisting of an arrangement containing marker sequences according to the invention.

[0100] In a further embodiment the marker sequences are present as clones. Such clones can be obtained for example by means of a cDNA expression library according to the invention (Büssow et al. 1998 (above)). In a preferred embodiment such expression libraries containing clones are obtained using expression vectors from a cDNA expression library consisting of the cDNA marker sequences. These expression vectors preferably contain inducible promoters. The induction of the expression can be carried out for example by means of an inducer, such as IPTG. Suitable expression vectors are described in Terpe et al. (Terpe T Appl Microbiol Biotechnol. 2003 January; 60(5):523-33). Expression libraries are known to a person skilled in the art; they can be produced in accordance with standard works, such as Sambrook et al, “Molecular Cloning, A laboratory handbook, 2nd edition (1989), CSH press, Cold Spring Harbor, N.Y. Expression libraries that are tissue-specific (for example human tissue, in particular human organs) are furthermore preferable. Further, expression libraries that can be obtained by means of exon-trapping are also included in accordance with the invention. Instead of the term expression library, reference may also be made synonymously to an expression bank.

[0101] Protein biochips or beads or corresponding expression libraries that do not exhibit any redundancy (what is known as a Uniclone® library) and that can be produced in accordance with the teaching of WO 99/57311 and WO 99/57312 are furthermore preferred. These preferred Uniclone® libraries have a high proportion of non-defective fully expressed proteins of a cDNA expression library.

[0102] Within the scope of this invention the clones can also be, but are not limited to, transformed bacteria, recombinant phages or transformed cells of mammals, insects, fungi, yeasts or plants.

[0103] The clones are fixed, spotted or immobilised on a solid support.

[0104] The invention therefore relates to an arrangement, wherein the marker sequences are present as clones.

[0105] In addition, the marker sequences can be present in the respective form of a fusion protein, which for example contains at least one affinity epitope or “tag”. The tag may be or may contain one such as c-myc, his tag, arg tag, FLAG, alkaline phosphatase, V5 tag, T7 tag or strep tag, HAT tag, NusA, S tag, SBP tag, thioredoxin, DsbA, a fusion protein, preferably a cellulose-binding domain, green fluorescent protein, maltose-binding protein, calmodulin-binding protein, glutathione S-transferase or lacZ.

[0106] A marker sequence can be composed of a number of individual marker sequences. This may include the cloning of individual fragments to form a large common fragment and the expression of this combined fragment.

[0107] In all embodiments, the term “solid support” includes embodiments such as a filter, a membrane, a magnetic or fluorophore-labelled pellet, a silicon wafer, glass, metal, plastic, a chip, a mass spectrometry target or a matrix. However, a filter and beads are preferred in accordance with the invention.

[0108] Furthermore, PVDF, nitrocellulose or nylon is preferred as a filter (for example Immobilon P Millipore, Protran Whatman, Hybond N+ Amersham).

[0109] In a further preferred embodiment of the arrangement according to the invention, this corresponds to a grid with the dimensions of a microtiter plate (8-12 well strips, 96 wells, 384 wells or more), a silicon wafer, a chip, a mass spectrometry target or a matrix.

[0110] In a further preferred embodiment pellets or what are known as beads are used as support. Here, bead-based multiplex assays are preferably used. The analysis and evaluation of the bead-based assays can be performed for example with a Luminex analysis system, which is performed on the basis of the method of flow cytometry with use of two different lasers.

[0111] Whereas the measurements on planar protein arrays offer merely a dynamic range of 1.5-2 magnitudes (powers of 10), a dynamic range of 3.5-4 magnitudes can be covered by the use of Luminex beads. The measurements in the low response ranges also provide very good coefficients of variation (CVs), i.e. no more than 10%.

[0112] Whereas the measurements on planar protein arrays offer merely coefficients of variation (CVs) from 10 to 25% (intra-array comparison) or 10 to 50% (inter-array comparison), the CVs of the Luminex measurements are located between 3 to 10%. An assay quality not generally achieved by commercial ELISAs is thus provided. The known disadvantages (limited plexing rate by interference of different detection antibodies) for Luminex-based analysis and diagnostic methods do not occur with the UNlarray concept, since merely a single fluorescence-labelled anti-human IgG from goat, sheep or mouse is used as detection probe. Due to the transfer of the UNlarray concept to Luminex (i.e. bead-based protein arrays), a number of apparatuses can additionally be saved, i.e. protein printers, hybridisation machines and array readers, and can be replaced by one apparatus. Here, the UNlarray concept is not bound to Luminex, but can also be used on other platforms, such as Randox, VBC Genomics, etc. The high measurement accuracy and the low CVs of the individual measurements allow the use of better and new statistical methods for the identification of potent individual markers and also for rapid sorting of false positives.

[0113] In a further embodiment the invention relates to an assay or protein biochip for identifying and characterising a substance for rheumatoid arthritis, characterised in that an arrangement or assay according to the invention is brought into contact with a.) at least one substance to be examined, and b.) binding success is detected. The substance to be examined may be any native or non-native biomolecule, a synthetic chemical molecule, a mixture, or a substance library. Once the substance to be examined contacts a marker sequence, the binding success is evaluated, this being performed for example with use of commercially available image analysing software (GenePix Pro (Axon Laboratories), Aida (Raytest), ScanArray (Packard Bioscience).

[0114] Protein-protein interactions (for example protein at the marker sequence, such as antigen/antibody) or corresponding “means for detecting the binding success” can be visualised for example by means of fluorescence labelling, biotinylation, radio-isotope labelling or colloid gold or latex particle labelling in the conventional manner. Bound antibodies are detected with the aid of secondary antibodies, which are labelled using commercially available reporter molecules (for example Cy, Alexa, Dyomics, FITC or similar fluorescent dyes, colloidal gold or latex particles), or with reporter enzymes, such as alkaline phosphatase, horseradish peroxidase, etc., and the corresponding colorimetric, fluorescent or chemoluminescent substrates. A readout is performed for example by means of a microarray laser scanner, a CCD camera or visually.

[0115] In a further embodiment the invention relates to a drug/active agent or prodrug for rheumatoid arthritis, developed and obtainable by the use of the assay or protein biochip according to the invention.

[0116] The invention therefore also relates to the use of an arrangement or an assay according to the invention for screening active agents for rheumatoid arthritis.

### EXAMPLES AND FIGURES

[0117] FIG. 1: Tables 8 and 8a

[0118] FIG. 2: Volcano Plot Rheumatoid Arthritis vs. Control

[0119] FIG. 3: Volcano Plot CCP negative in the RA Group vs. Control

### EXAMPLE 1

### Selection of the Marker Sequence Candidates and Production of the Luminex Beads

[0120] Ten or more patient samples were screened individually against a cDNA expression library. The rheumatoid arthritis-specific expression clones were determined by a comparison with ten or more healthy samples. The identity of the marker sequences was determined by DNA sequencing.

[0121] Differential screening was performed between two protein biochips, one from a cDNA expression bank of a patient and one from a healthy test subject, and the differential clones were detected by means of fluorescence labelling and evaluated by means of bioinformatics.

[0122] There were about ˜3,500 proteins which were included in examinations with protein biochips and were apparent as antigens for inflammatory diseases.

[0123] These 3,500 proteins were then produced in relatively large quantities (several mg), purified, and coupled on Luminex beads. In addition, biomarkers already known (public domain), such as CCP, for rheumatoid arthritis, Aquaporin 4 for Neuromyolitis Optica, various cytokines, typical autoimmune markers, etc., were produced and measured together with the 3,500 proteins. The inclusion of known autoantigens in screening and validation is important insofar as the best new candidates can be selected very quickly as a result.

### EXAMPLE 2

### Selection of the Patients and Test Subjects for the Validation of the Marker Sequence Candidates

[0124] Selection of the group of individuals to be tested: Patients with rheumatoid arthritis (RA) and test subjects without rheumatoid arthritis (control).

TABLE 1
Homogeneity analysis of the groups (patients, test subjects)

| | Group | Attribute | p-value |
|---|---|---|---|
| 1 | RA vs. | Age | 0.3996 |
| | Control | | |
| 2 | RA vs. | Gender | <0.0001 |
| | control | | |

TABLE 2
Statistical data regarding the age of the group

| | | | N | | | | | |
|---|---|---|---|---|---|---|---|---|
| | Group | N | miss | Mean | Median | SD | Min. | Max. |
| 1 | Control | 71 | 0 | 54.62 | 56.00 | 11.32 | 26.00 | 69.00 |
| 2 | RA | 75 | 0 | 56.56 | 57.00 | 13.23 | 25.00 | 89.00 |

TABLE 3
Statistical data regarding the sex of the group

| | Group | Sex | Frequency | Proportion |
|---|---|---|---|---|
| 1 | Control | F | 52 | 73.24 |
| 2 | Control | M | 19 | 26.76 |
| 3 | RA | F | 54 | 72.00 |
| 4 | RA | M | 21 | 28.00 |

TABLE 4
Statistical data for DAS28

| | | | N | | | | | |
|---|---|---|---|---|---|---|---|---|
| | Group | N | miss | Mean | Median | SD | Min. | Max. |
| 1 | Control | 0 | 71 | | | | | |
| 2 | RA | 55 | 20 | 3.28 | 3.00 | 1.14 | 1.60 | 5.70 |

TABLE 5
Statistical data for DAS28 in view of category

| | Group | DAS 28 | Range | Frequency | Proportion |
|---|---|---|---|---|---|
| 1 | Control | Remission | <2.6 | 0 | 0.00 |
| 2 | Control | Low | 2.6-3.1 | 0 | 0.00 |
| 3 | Control | Moderate | >3.2-5.1 | 0 | 0.00 |
| 4 | Control | High | >5.1 | 0 | 0.00 |
| 5 | RA | Remission | <2.6 | 17 | 30.91 |
| 6 | RA | Low | 2.6-3.1 | 13 | 23.64 |
| 7 | RA | Moderate | >3.2-5.1 | 19 | 34.55 |
| 8 | RA | High | >5.1 | 6 | 10.91 |

TABLE 6
Statistical data in respect of the duration
of the illness

| | | | N | | | | | |
|---|---|---|---|---|---|---|---|---|
| | Group | N | miss | Mean | Median | SD | Min. | Max. |
| 1 | Control | 0 | 71 | | | | | |
| 2 | RA | 71 | 4 | 132.20 | 79.36 | 132.50 | 1.38 | 543.40 |

### EXAMPLE 3

### Identification of the Marker Sequences According to the Invention

[0125] Table 7 summarises the clone sequences SEQ ID No. 1 to 91 and 274 to 293, which are specific for rheumatoid arthritis and were used for identification of the sequences SEQ ID No. 92 to 273 and 294 to 333 specific for rheumatoid arthritis. The details regarding the sequence data will become clear from the accompanying sequence protocol.

TABLE 7

| SEQ | | | | | | |
|---|---|---|---|---|---|---|
| ID | | Gene | | | | |
| No. | Comparison | ID | Gene Name | Gene Symbol | RefSeq Accession | GI Accession |
| 1 | Control | 8655 | dynein, light | DYNLL1 | ref\|NM_003746 | gi\|4505813 |
| | vs RA | | chain, LC8-type 1 | | | |
| 2 | Control | 440 | asparagine | ASNS | ref\|NM_133436 | gi\|168229248 |
| | vs RA | | synthetase | | | |
| | | | (glutamine- | | | |
| | | | hydrolyzing) | | | |
| 3 | Control | 79703 | chromosome 11 | C11orf80 | ref\|NM_024650 | gi\|170932471 |
| | vs RA | | open reading | | | |
| | | | frame 80 | | | |
| 4 | Control | 977 | CD151 molecule | CD151 | ref\|NM_004357 | gi\|21237748 |
| | vs RA | | (Raph blood | | | |
| | | | group) | | | |
| 5 | Control | 896 | cyclin D3 | CCND3 | ref\|NM_001760 | gi\|4502619 |
| | vs RA | | | | | |
| 6 | Control | 309 | annexin A6 | ANXA6 | ref\|NM_004033 | gi\|71773415 |
| | vs RA | | | | | |
| 7 | Control | 440354 | PI-3-kinase- | LOC440354 | | gi\|194385888 |
| | vs RA | | related kinase | | | |
| | | | SMG-1 | | | |
| | | | pseudogene | | | |
| 8 | Control | 5909 | RAP1GAP RAP1 | RAP1GAP | ref\|NM_002885 | gi\|4506415 |
| | vs RA | | GTPase | | | |
| | | | activating | | | |
| | | | protein [Homo | | | |
| | | | sapiens] | | | |
| 9 | Control | 8751 | ADAM | ADAM15 | ref\|NM_207196 | gi\|46909598 |
| | vs RA | | metallopeptidas | | | |
| | | | domain 15 | | | |
| 10 | Control | 1175 | adaptor-related | AP2S1 | ref\|NM_004069 | gi\|70906430 |
| | vs RA | | protein complex | | | |
| | | | 2, sigma 1 | | | |
| | | | subunit | | | |
| 11 | Control | 326625 | methylmalonic | MMAB | ref\|NM_052845 | gi\|16418349 |
| | vs RA | | aciduria | | | |
| | | | (cobalamin | | | |
| | | | deficiency) cbIB | | | |
| | | | type | | | |
| 12 | Control | 9129 | PRP3 pre-mRNA | PRPF3 | ref\|NM_004698 | gi\|4758556 |
| | vs RA | | processing | | | |
| | | | factor 3 | | | |
| | | | homolog (S. | | | |
| | | | cerevisiae) | | | |
| 13 | Control | 23170 | tubulin tyrosine | TTLL12 | ref\|NM_015140 | gi\|11056036 |
| | vs RA | | ligase-like | | | |
| | | | family, member | | | |
| | | | 12 | | | |
| 14 | Control | 3098 | hexokinase 1 | HK1 | ref\|NM_033500 | gi\|188497750 |
| | vs RA | | | | | |
| 15 | Control | 81620 | chromatin | CDT1 | ref\|NM_030928 | gi\|188497689 |
| | vs RA | | licensing and | | | |
| | | | DNA replication | | | |
| | | | factor 1 | | | |
| 16 | Control | 8140 | solute carrier | SLC7A5 | ref\|NM_003486 | gi\|71979932 |
| | vs RA | | family 7 (amino | | | |
| | | | acid transporter | | | |
| | | | light chain, L | | | |
| | | | system), | | | |
| | | | member 5 | | | |
| 17 | Control | 27344 | proprotein | PCSK1N | ref\|NM_013271 | gi\|7019519 |
| | | | convertase | | | |
| | | | subtilisin/kexin | | | |
| | | | type 1 inhibitor | | | |
| 18 | Control | 727910 | TLC domain | TLCD2 | | gi\|205830928 |
| | vs RA | | containing 2 | | | |
| 19 | Control | 5819 | poliovirus | PVRL2 | ref\|NM_001042724 | gi\|112789532 |
| | vs RA | | receptor-related | | | |
| | | | 2 (herpesvirus | | | |
| | | | entry mediator B) | | | |
| 20 | Control | 84196 | ubiquitin | USP48 | ref\|NM_032236 | gi\|52630449 |
| | vs RA | | specific | | | |
| | | | peptidase 48 | | | |
| 21 | Control | 22913 | RNA binding | RALY | ref\|NM_016732 | gi\|8051631 |
| | vs RA | | protein, | | | |
| | | | autoantigenic | | | |
| | | | (hnRNP- | | | |
| | | | associated with | | | |
| | | | lethal yellow | | | |
| | | | homolog | | | |
| | | | (mouse)) | | | |
| 22 | Control | 64221 | roundabout, | ROBO3 | ref\|NM_022370 | gi\|48476182 |
| | vs RA | | axon guidance | | | |
| | | | receptor, | | | |
| | | | homolog 3 | | | |
| | | | (Drosophila) | | | |
| 23 | Control | 728294 | D-2-hydroxyglutarate | D2HGDH | ref\|NM_152783 | gi\|119964728 |
| | vs RA | | dehydrogenase | | | |
| 24 | Control | 79921 | transcription | TCEAL4 | ref\|NM_001006935 | gi\|55749442 |
| | vs RA | | elongation | | | |
| | | | factor A (SII)-like 4 | | | |
| 25 | Control | 147808 | zinc finger | ZNF784 | ref\|NM_203374 | gi\|42794622 |
| | vs RA | | protein 784 | | | |
| 26 | Control | 9040 | UBE2M | UBE2M | ref\|NM_003969 | gi\|150417997 |
| | vs RA | | ubiquitin- | | | |
| | | | conjugating | | | |
| | | | enzyme E2M [Homo | | | |
| | | | sapiens] | | | |
| 27 | Control | 55778 | ZNF839 zinc | ZNF839 | ref\|NM_018335 | gi\|153251839 |
| | vs RA | | finger protein | | | |
| | | | 839 [Homo | | | |
| | | | sapiens] | | | |
| 28 | Control | 27344 | proprotein | PCSK1N | ref\|NM_013271 | gi\|7019519 |
| | vs RA | | convertase | | | |
| | | | subtilisin/kexin | | | |
| | | | type 1 inhibitor | | | |
| 29 | Control | 10726 | nuclear | NUDC | ref\|NM_006600 | gi\|5729953 |
| | vs RA | | distribution | | | |
| | ccp neg | | gene C homolog | | | |
| | | | (A. nidulans) | | | |
| 30 | Control | 9890 | lipid phosphate | LPPR4 | ref\|NM_014839 | gi\|33636722 |
| | vs RA | | phosphatase- | | | |
| | ccp neg | | related protein | | | |
| | | | type 4 | | | |
| 31 | Control | 1794 | dedicator of | DOCK2 | ref\|NM_004946 | gi\|31377468 |
| | vs RA | | cytokinesis 2 | | | |
| | ccp neg | | | | | |
| 32 | Control | 3931 | lecithin- | LCAT | ref\|NM_000229 | gi\|4557892 |
| | vs RA | | cholesterol | | | |
| | ccp neg | | acyltransferase | | | |
| 33 | Control | 58513 | epidermal | EPS15L1 | ref\|NM_021235 | gi\|10864047 |
| | vs RA | | growth factor | | | |
| | ccp neg | | receptor | | | |
| | | | pathway | | | |
| | | | substrate 15- | | | |
| | | | like 1 | | | |
| 34 | Control | 1513 | cathepsin K | CTSK | ref\|NM_000396 | gi\|4503151 |
| | vs RA | | | | | |
| | ccp neg | | | | | |
| 35 | Control | 64434 | nucleolar | NOM1 | ref\|NM_138400 | gi\|61097912 |
| | vs RA | | protein with | | | |
| | ccp neg | | MIF4G domain 1 | | | |
| 36 | Control | 203068 | tubulin, beta | TUBB | ref\|NM_178014 | gi\|29788785 |
| | vs RA | | | | | |
| | ccp neg | | | | | |
| 37 | Control | 119504 | anaphase | ANAPC16 | ref\|NM_173473 | gi\|27735039 |
| | vs RA | | promoting | | | |
| | ccp neg | | complex subunit | | | |
| | | | 16 | | | |
| 38 | Control | 59277 | netrin 4 | NTN4 | ref\|NM_021229 | gi\|93204871 |
| | vs RA | | | | | |
| | ccp neg | | | | | |
| 39 | Control | 6232 | ribosomal | RPS27 | ref\|NM_001030 | gi\|4506711 |
| | vs RA | | protein S27 | | | |
| | ccp neg | | | | | |
| 40 | Control | 23151 | GRAM domain | GRAMD4 | ref\|NM_015124 | gi\|67763814 |
| | vs RA | | containing 4 | | | |
| | ccp neg | | | | | |
| 41 | Control | 6189 | ribosomal | RPS3A | ref\|NM_001006 | gi\|4506723 |
| | vs RA | | protein S3A | | | |
| | ccp neg | | | | | |
| 42 | Control | 6432 | serine/arginine- | SRSF7 | ref\|NM_001031684 | gi\|72534660 |
| | vs RA | | rich splicing | | | |
| | ccp neg | | factor 7 | | | |
| 43 | Control | 7874 | ubiquitin | USP7 | ref\|NM_003470 | gi\|150378533 |
| | vs RA | | specific | | | |
| | ccp neg | | peptidase 7 | | | |
| | | | (herpes virus- | | | |
| | | | associated) | | | |
| 44 | Control | 6418 | SET nuclear | SET | ref\|NM_003011 | gi\|170763498 |
| | vs RA | | oncogene | | | |
| | ccp neg | | | | | |
| 45 | Control | 11258 | dynactin 3 (p22) | DCTN3 | ref\|NM_007234 | gi\|6005745 |
| | vs RA | | | | | |
| | ccp neg | | | | | |
| 46 | Control | 9733 | squamous cell | SART3 | ref\|NM_014706 | gi\|7661952 |
| | vs RA | | carcinoma | | | |
| | ccp neg | | antigen | | | |
| | | | recognized by T | | | |
| | | | cells 3 | | | |
| 47 | Control | 5217 | profilin 2 | PFN2 | ref\|NM_053024 | gi\|16753215 |
| | vs RA | | | | | |
| | ccp neg | | | | | |
| 48 | Control | 302 | annexin A2 | ANXA2 | ref\|NM_004039 | gi\|4757756 |
| | vs RA | | | | | |
| | ccp neg | | | | | |
| 49 | Control | 55830 | glycosyltransfer | GLT8D1 | ref\|NM_018446 | gi\|8923855 |
| | vs RA | | ase 8 domain | | | |
| | ccp neg | | containing 1 | | | |
| 50 | Control | 3557 | interleukin 1 | IL1RN | ref\|NM_000577 | gi\|10835147 |
| | vs RA | | receptor | | | |
| | ccp neg | | antagonist | | | |
| 51 | Control | 90809 | transmembrane | TMEM55B | ref\|NM_144568 | gi\|154816184 |
| | vs RA | | protein 55B | | | |
| | ccp neg | | | | | |
| 52 | Control | 163033 | zinc finger | ZNF579 | ref\|NM_152600 | gi\|110681708 |
| | vs RA | | protein 579 | | | |
| | ccp neg | | | | | |
| 53 | Control | 9605 | chromosome 16 | C16orf7 | ref\|NM_004913 | gi\|108860690 |
| | vs RA | | open reading | | | |
| | ccp neg | | frame 7 | | | |
| 54 | Control | 6710 | spectrin, beta, | SPTB | ref\|NM_001024858 | gi\|67782321 |
| | vs RA | | erythrocytic | | | |
| | ccp neg | | | | | |
| 55 | Control | 2934 | gelsolin | GSN | ref\|NM_198252 | gi\|38044288 |
| | vs RA | | | | | |
| | ccp neg | | | | | |
| 56 | Control | 4591 | tripartite motif | TRIM37 | ref\|NM_015294 | gi\|15147333 |
| | vs RA | | containing 37 | | | |
| | ccp neg | | | | | |
| 57 | Control | 6903 | tubulin folding | TBCC | ref\|NM_003192 | gi\|4507373 |
| | vs RA | | cofactor C | | | |
| | ccp neg | | | | | |
| 58 | Control | 11140 | cell division | CDC37 | ref\|NM_007065 | gi\|5901922 |
| | vs RA | | cycle 37 | | | |
| | ccp neg | | homolog (S. | | | |
| | | | cerevisiae) | | | |
| 59 | Control | 7458 | eukaryotic | EIF4H | ref\|NM_031992 | gi\|14702180 |
| | vs RA | | translation | | | |
| | ccp neg | | initiation factor 4H | | | |
| 60 | Control | 6687 | spastic paraplegia 7 | SPG7 | ref\|NM_003119 | gi\|4507173 |
| | vs RA | | (pure and | | | |
| | ccp neg | | complicated | | | |
| | | | autosomal | | | |
| | | | recessive) | | | |
| 61 | Control | 22902 | RUN and FYVE | RUFY3 | ref\|NM_014961 | gi\|7662352 |
| | vs RA | | domain containing 3 | | | |
| | ccp neg | | | | | |
| 62 | Control | 6144 | ribosomal | RPL21 | ref\|NM_000982 | gi\|18104948 |
| | vs RA | | protein L21 | | | |
| | ccp neg | | | | | |
| 63 | Control | 84893 | F-box protein, | FBXO18 | ref\|NM_178150 | gi\|30795119 |
| | vs RA | | helicase, 18 | | | |
| | ccp neg | | | | | |
| 64 | Control | 10295 | branched chain | BCKDK | ref\|NM_005881 | gi\|171906589 |
| | vs RA | | ketoacid | | | |
| | ccp neg | | dehydrogenase | | | |
| | | | kinase | | | |
| 65 | Control | 3980 | ligase III, DNA, | LIG3 | ref\|NM_002311 | gi\|173747844 |
| | vs RA | | ATP-dependent | | | |
| | ccp neg | | | | | |
| 66 | Control | 3913 | laminin, beta 2 | LAMB2 | ref\|NM_002292 | gi\|1119703755 |
| | vs RA | | (laminin S) | | | |
| | ccp neg | | | | | |
| 67 | Control | 221061 | family with | FAM171A1 | ref\|NM_001010924 | gi\|163025206 |
| | vs RA | | sequence | | | |
| | ccp neg | | similarity 171, | | | |
| | | | member A1 | | | |
| 68 | Control | 790 | carbamoyl- | CAD | ref\|NM_004341 | gi\|18105007 |
| | vs RA | | phosphate | | | |
| | ccp neg | | synthetase 2, | | | |
| | | | aspartate | | | |
| | | | transcarbamylase, | | | |
| | | | and dihydroorotase | | | |
| 69 | Control | 8891 | eukaryotic | EIF2B3 | ref\|NM_020365 | gi\|19966779 |
| | vs RA | | translation | | | |
| | ccp neg | | initiation factor | | | |
| | | | 2B, subunit 3 | | | |
| | | | gamma, 58 kDa | | | |
| 70 | Control | 23367 | La | LARP1 | ref\|NM_015315 | gi\|139725634 |
| | vs RA | | ribonucleoprote | | | |
| | ccp neg | | in domain | | | |
| | | | family, member 1 | | | |
| 71 | Control | 3913 | laminin, beta 2 | LAMB2 | ref\|NM_002292 | gi\|19703755 |
| | vs RA | | (laminin S) | | | |
| | ccp neg | | | | | |
| 72 | Control | 4000 | lamin A/C | LMNA | ref\|NM_170707 | gi\|27436946 |
| | vs RA | | | | | |
| | ccp neg | | | | | |
| 73 | Control | 9026 | huntingtin | HIP1R | ref\|NM_003959 | gi\|48762942 |
| | vs RA | | interacting | | | |
| | ccp neg | | protein 1 | | | |
| | | | related | | | |
| 74 | Control | 23608 | makorin ring | MKRN1 | | gi\|1119604358 |
| | vs RA | | finger protein 1 | | | |
| | ccp neg | | | | | |
| 75 | Control | 51585 | PCF11, cleavage | PCF11 | ref\|NM_015885 | gi\|133620745 |
| | vs RA | | and | | | |
| | ccp neg | | polyadenylation | | | |
| | | | factor subunit, | | | |
| | | | homolog (S. | | | |
| | | | cerevisiae) | | | |
| 76 | Control | 10808 | heat shock | HSPH1 | ref\|NM_006644 | gi\|42544159 |
| | vs RA | | 105 kDa/110 kDa | | | |
| | ccp neg | | protein 1 | | | |
| 77 | Control | 5716 | proteasome | PSMD10 | ref\|NM_002814 | gi\|4506217 |
| | vs RA | | (prosome, | | | |
| | ccp neg | | macropain) 26S | | | |
| | 9026 | | subunit, non- | | | |
| | | | ATPase, 10 | | | |
| 78 | Control | 57662 | calmodulin | CAMSAP3 | ref\|NM_020902 | gi\|130502140 |
| | vs RA | | regulated | | | |
| | ccp neg | | spectrin- | | | |
| | | | associated | | | |
| | | | protein family, | | | |
| | | | member 3 | | | |
| 79 | Control | 23608 | makorin ring | MKRN1 | ref\|NM_013446 | gi\|223468619 |
| | vs RA | | finger protein 1 | | | |
| | ccp neg | | | | | |
| 80 | Control | 440354 | PI-3-kinase- | LOC440354 | AK304513 | gi\|194385888 |
| | vs RA | | related kinase | | | |
| | | | SMG-1 | | | |
| | | | pseudogene | | | |
| 81 | Control | 727910 | TLC domain | TLCD2 | ref\|NM_001164407 | gi\|256542293 |
| | vs RA | | containing 2 | | | |
| 82 | Control | 9322 | thyroid | TRIP10 | ref\|NM_004240 | gi\|11342676 |
| | vs RA | | hormone | | | |
| | | | receptor | | | |
| | | | interactor 10 | | | |
| 83 | Control | 9516 | lipopolysacchari | LITAF | ref\|NM_004862 | gi\|165787265 |
| | vs RA | | de-induced TNF | | | |
| | | | factor | | | |
| 84 | Control | 9815 | G protein-coupled | GIT2 | ref\|NM_057169 | gi\|17149830 |
| | vs RA | | receptor kinase | | | |
| | | | interacting | | | |
| | | | ArfGAP 2 | | | |
| 85 | Control | 79643 | chromatin | CHMP6 | ref\|NM_024591 | gi\|31542673 |
| | vs RA | | modifying | | | |
| | | | protein 6 | | | |
| 86 | Control | 23635 | single-stranded | SSBP2 | ref\|NM_012446 | gi\|40787999 |
| | vs RA | | DNA binding | | | |
| | | | protein 2 | | | |
| 87 | Control | 57176 | valyl-tRNA | VARS2 | ref\|NM_020442 | gi\|155741845 |
| | vs RA | | synthetase 2, | | | |
| | | | mitochondrial | | | |
| | | | (putative) | | | |
| 88 | Control | 3190 | heterogeneous | HNRNPK | ref\|NM_031263 | gi\|14165437 |
| | vs RA | | nuclear | | | |
| | | | ribonucleoprote | | | |
| | | | in K | | | |
| 89 | Control | 375 | ADP- | ARF1 | ref\|NM_001658 | gi\|4502201 |
| | vs RA | | fibosylation | | | |
| | | | factor 1 | | | |
| 90 | Control | 4122 | mannosidase, | MAN242 | ref\|NM_006122 | gi\|51477716 |
| | vs RA | | alpha, class 2A, | | | |
| | | | member 2 | | | |
| 91 | Control | 54522 | ankyrin repeat | ANKRD16 | ref\|NM_019046 | gi\|58331111 |
| | vs RA | | domain 16 | | | |
| 274 | Control | 1211 | clathrin, light | CLTA | ref\|NM_007096 | gi\|6005993 |
| | ccp | | chain A | | | |
| | neg/Control | | | | | |
| | vs RA | | | | | |
| 275 | Control | 4898 | nardilysin | NRD1 | ref\|NM_001101662 | gi\|156071452 |
| | vs RA | | (Narginine dibasic | | | |
| | | | covertase) | | | |
| 276 | Control | 5425 | polymerase | POLD2 | ref\|NM_006230 | gi\|379056381 |
| | vs RA | | (DNA directed), | | | |
| | ccp neg | | delta 2, | | | |
| | | | accessory | | | |
| | | | subunit | | | |
| 277 | Control | 27289 | Rho family | RND1 | ref\|NM_014470 | gi\|7657514 |
| | vs RA | | GTPase 1 | | | |
| 278 | Control | 51343 | fizzy/cell | FZR1 | ref\|NM_01136197 | gi\|209969678 |
| | vs RA | | divison cycle 20 | | | |
| | ccp | | related 1 | | | |
| | neg/Control | | (Drosophila) | | | |
| | vs RA | | | | | |
| 279 | Control | 10381 | tubulin, beta 3 | TUBB3 | ref\|NM_006086 | gi\|50592996 |
| | vs RA | | class III | | | |
| 280 | Control | 3799 | kinesin family | KIF5B | ref\|NM_004521 | gi\|4758648 |
| | vs RA | | member 5B | | | |
| 281 | Control | 1152 | creatine kinase, | CKB | ref\|NM_001823 | gi\|21536286 |
| | vs RA | | brain | | | |
| 282 | Control | 7552 | zinc finger | ZNF711 | ref\|NM_021998 | gi\|68348723 |
| | vs RA | | protein 711 | | | |
| 283 | Control | 8682 | phosphoprotein | PEA15 | ref\|NM_003768 | gi\|4505705 |
| | vs RA | | enriched in | | | |
| | | | astrocytes 15 | | | |
| 284 | Control | 57498 | kinase D- | KIDINS220 | ref\|NM_020738 | gi\|55741641 |
| | vs RA | | interacting | | | |
| | | | substrate, | | | |
| | | | 220 kDa | | | |
| 285 | Control | 10038 | poly (ADP-ribose) | PARP2 | ref\|NM_001042618 | gi\|110825963 |
| | vs RA | | polymerase 2 | | | |
| | ccp neg | | | | | |
| 286 | Control | 23474 | ethylmalonic | ETHE1 | ref\|NM_014297 | gi\|41327741 |
| | vs RA | | encephalopathy 1 | | | |
| | ccp neg | | | | | |
| 287 | Control | 1509 | cathepsin D | CTSD | ref\|NM_001909 | gi\|4503143 |
| | vs RA | | | | | |
| | ccp neg | | | | | |
| 288 | Control | 3303 | heat shock | HSPA1A | ref\|NM_005345 | gi\|194248072 |
| | vs RA | | 70 kDa protein 1A | | | |
| | ccp neg | | | | | |
| 289 | Control | 79140 | coiled-coil | CDDC28B | ref\|NM_024296 | gi\|110349769 |
| | vs RA | | domain | | | |
| | | | containing 28B | | | |
| 290 | Control | 6196 | ribsosomal | RPS6KA2 | ref\|NM_021135 | gi\|19923570 |
| | vs RA | | protein S6 | | | |
| | | | kinase, 90 kDa, | | | |
| | | | polypeptide 2 | | | |
| 291 | Control | 64943 | 5′-nucleotidase | NT5DC2 | ref\|NM_022908 | gi\|12597653 |
| | vs RA | | domain | | | |
| | ccp neg | | containing 2 | | | |
| 292 | Control | 25796 | 6-phosphoglucon | PGLS | ref\|NM_012088 | gi\|6912586 |
| | vs RA | | olactonase | | | |
| 293 | Control | 55684 | RAB, member | RABL6 | ref\|NM_024718 | gi\|186700623 |
| | vs RA | | RAS oncogene | | | |
| | | | family-like 6 | | | |

[0126] The statistical results regarding the validated marker sequence candidates (marker sequences according to the invention for rheumatoid arthritis) are specified in Tables 8 and 8a (FIG. 1).

The application's sequence listing, which the Patent Office published only in electronic form, follows.

SEQUENCE LISTING (333 sequences)

SEQ ID NO: 1 - DNA, 654 bp, Homo sapiens
tagagaaattactatgagaggatcgcatcaccatcaccatcacggatcctatttaggtgacactatagaatcgtcgacccacgcgtccgccacggtaaccatgtgcgaccgaaaggccgtgatcaaaaatgcggacatgtcggaagagatgcaacaggactcggtggagtgcgctactcaggcgctggagaaatacaacatagagaaggacattgcggctcatatcaagaaggaatttgacaagaagtacaatcccacctggcattgcatcgtggggaggaacttcggtagttatgtgacacatgaaaccaaacacttcatctacttctacctgggccaagtggccattcttctgttcaaatctggttaaaagcatggactgtgccacacacccagtgatccatccaaaaacaaggactgcagcctaaattccaaataccagagactgaaattttcagccttgctaagggaacatctcgatgtttgaacctttgttgtgttttgtacagggcattctctgtactagtttgtcgtggttataaaacaattagcagaatagcctacatttgtatttattttctattccatacttctgcccacgttgttttctctcaaaatccattcctttaaaaaataaatctgatgcagatgtgt

SEQ ID NO: 2 - DNA, 627 bp, Homo sapiens
  misc_feature (9)..(9): n is a, c, g, or t
  misc_feature (42)..(42): n is a, c, g, or t
  misc_feature (52)..(52): n is a, c, g, or t
  misc_feature (74)..(74): n is a, c, g, or t
tcgagaatntaaaaaattatttgctttgtgagcggatacatntaatagattnattgtgagcggataacaatttncacagaattcattaaagaggagaaattaactatgagaggatcgcatcaccatcaccatcacggatcctatttaggtgacactatagaatcgtcgacccacgcgtccgaaggcattcaggctctggatgaagtcatattttccttggaaacttatgacattacaacagttcgtgcttcagtaggtatgtatttaatttccaagtatattcggaagaacacagatagcgtggtgatcttctctggagaaggatcagatgaacttacgcagggttacatatattttcacaaggctccttctcctgaaaaagccgaggaggagagtgagaggcttctgagggaactctatttgtttgatgttctccgcgcagatcgaactactgctgcccatggtcttgaactgagagtcccatttctagatcatcgattttcttcctattacttgtctctgccaccagaaatgagaattccaaagaatgggatagaaaaacatctcctgagagagacgtttgaggattccaatctgatacccaaagagattctctggcgaccaaaa

SEQ ID NO: 3 - DNA, 1179 bp, Homo sapiens
  misc_feature (969)..(969): n is a, c, g, or t
  misc_feature (972)..(972): n is a, c, g, or t
  misc_feature (978)..(978): n is a, c, g, or t
  misc_feature (980)..(980): n is a, c, g, or t
  misc_feature (997)..(997): n is a, c, g, or t
  misc_feature (1002)..(1002): n is a, c, g, or t
  misc_feature (1022)..(1022): n is a, c, g, or t
  misc_feature (1040)..(1040): n is a, c, g, or t
  misc_feature (1042)..(1042): n is a, c, g, or t
  misc_feature (1055)..(1055): n is a, c, g, or t
  misc_feature (1088)..(1088): n is a, c, g, or t
  misc_feature (1097)..(1097): n is a, c, g, or t
  misc_feature (1106)..(1106): n is a, c, g, or t
  misc_feature (1119)..(1119): n is a, c, g, or t
  misc_feature (1123)..(1123): n is a, c, g, or t
  misc_feature (1140)..(1140): n is a, c, g, or t
  misc_feature (1145)..(1145): n is a, c, g, or t
  misc_feature (1148)..(1149): n is a, c, g, or t
  misc_feature (1153)..(1154): n is a, c, g, or t
  misc_feature (1158)..(1160): n is a, c, g, or t
  misc_feature (1166)..(1166): n is a, c, g, or t
  misc_feature (1170)..(1170): n is a, c, g, or t
agagagaattactatgagaggatcgcatcaccatcaccatcacggatcctatttaggtgacactatagaatcgtcgacccacgcgtccgccctgcgcggcatggaggggacggccgtggccgtgttcgagattttgagatttttaataattcactggaagtgtgacatagatgtatcaaagggagcattgctagaagggcagctagtgatttccatagaaggattaaattctaagcaccaggcaaatgctcttcattgtgtaacaactattgcttctgcaggaagcctttttggtggcatggtcctcaagaagttcctaaaagttccagctcccaaactccagacatcttaggaagggttttatgcttctggattttcctttcctcctgaatttcatcactcaggaaatcaatcaaagctttgtctccttcgcacgccacacccacagccggaggtgcagggcccgcgaggccgcagggggcccggccgcagaacacgcgcgcaaactgagcagcctgaagggcgggcgcacagccggggcgccggccaggagctgccggaaaggcggggcgggccccgggggtgtggaagccggcgacgcagaagcccagcatatggggcactcagcgcagcagtggcagcatggcggagaggactgcgaacatgtgcggatgcaaaggacaacccaggcctagagacagtctcaaactcctgggctcaagtgattctcctgcctcagcctcccaaattgctgggattacagacttgagccactgcacccagccttctccatgtctttagggacaaacttctaggatgaaatttaggatgaattaagtcattagcttgacaccatgatgtacaaatccctgaatttcagtttcattgttaaaatgccattgtttcaagatgctcagttggctatggaaagataggtcatctatcccagctactcagggggatcttttngancccaanangtcaaggctacagtganctgcnatcacagcactgcactctancccgggcaacaaagtganantgtctccaaaaanaaaataaaaatttatatgggaaaaaaaaccccnaaaaacccncccctattnaaaaaaaaagtcngggnatgggcctacctgactncaaanttnnaaannctannnaatttncccnagggaatta

SEQ ID NO: 4 - DNA, 1235 bp, Homo sapiens
  misc_feature (1)..(1235): n is a, c, g, or t
tagagaaattactatgagaggatcgcatcaccatcaccatcacggatcctatttaggtgacactatagaatcgtcgacccacgcgtccgcccacgcgtccggtggtagccccaggatgggtgagttcaacgagaagaagacaacatgtggcaccgtttgcctcaagtacctgctgtttacctacaattgctgcttctggctggctggcctggctgtcatggcagtgggcatctggacgctggccctcaagagtgactacatcagcctgctggcctcaggcacctacctggccacagcctacatcctggtggtggcgggcactgtcgtcatggtgactggggtcttgggctgctgcgccaccttcaaggagcgtcggaacctgctgcgcctgtacttcatcctgctcctcatcatctttctgctggagatcatcgctggtatcctcgcctacgcctactaccagcagctgaacacggagctcaaggagaacctgaaggacaccatgaccaagcgctaccaccagccgggccatgaggctgtgaccagcgctgtggaccagctgcagcaggagttccactgctgtggcagcaacaactcacaggactggcgagacagtgagtggatccgctcacaggaggccggtggccgtgtggtcccagacagctgctgcaagacggtggtggctctttgtggacagcgagaccatgcctccaacatctacaaggtggagggcggctgcatcaccaagttggagaccttcatccaggagcacctganggtcattgggggctgtggggatcggcattgcctgtgtgcaggtctttggcatgatcttcacgtgctgcctgtacaggantctcaagctggancactactgaccctgccttgggccttgctgctgctgcacccaactactgagctgaaaccactgaatacaaggggctgggctccctgatganacccacctgtgcnatcaccatacctctggggnacccaacctcaaangcagcttcagtgcctttngctgcccacaatgccaacanggaagtgaagggggctggcgggccaaatttggggggggtttttgggggnntccccgnaaaaaactctttgcctgggggnnnaaaaacnngnttgaaaagggnccttttttnaatggnccaaaggncnaaantttccccnnaagggggaaaaaccnttncaccccnnncccctttaaaaaanggggntttttn

SEQ ID NO: 5 - DNA, 1124 bp, Homo sapiens
  misc_feature (4)..(4): n is a, c, g, or t
  misc_feature (893)..(893): n is a, c, g, or t
  misc_feature (902)..(902): n is a, c, g, or t
  misc_feature (936)..(936): n is a, c, g, or t
  misc_feature (954)..(954): n is a, c, g, or t
  misc_feature (963)..(963): n is a, c, g, or t
  misc_feature (973)..(973): n is a, c, g, or t
  misc_feature (978)..(978): n is a, c, g, or t
  misc_feature (983)..(983): n is a, c, g, or t
  misc_feature (997)..(997): n is a, c, g, or t
  misc_feature (1003)..(1004): n is a, c, g, or t
  misc_feature (1013)..(1013): n is a, c, g, or t
  misc_feature (1020)..(1020): n is a, c, g, or t
  misc_feature (1030)..(1030): n is a, c, g, or t
  misc_feature (1033)..(1035): n is a, c, g, or t
  misc_feature (1037)..(1037): n is a, c, g, or t
  misc_feature (1041)..(1041): n is a, c, g, or t
  misc_feature (1044)..(1044): n is a, c, g, or t
  misc_feature (1051)..(1051): n is a, c, g, or t
  misc_feature (1054)..(1054): n is a, c, g, or t
  misc_feature (1057)..(1058): n is a, c, g, or t
  misc_feature (1068)..(1068): n is a, c, g, or t
  misc_feature (1071)..(1071): n is a, c, g, or t
  misc_feature (1078)..(1078): n is a, c, g, or t
  misc_feature (1081)..(1081): n is a, c, g, or t
  misc_feature (1093)..(1093): n is a, c, g, or t
  misc_feature (1102)..(1102): n is a, c, g, or t
aaantagagaaattactatgagaggatcgcatcaccatcaccatcacggatcctatttaggtgacactatagaatcgtcgacccacgcgtccgcccacgcgtccggatccgccgcgcagtgccagcgccagcgccagacccgcgccccgcgctctccggcccgtcgcctgccttgggactcgcgagcccgcactcccgccctgcctgttcgctgcccgagtatggagctgctgtgttgcgaaggcacccggcacgcgccccgggccgggccggacccgcggctgctgggggaccagcgtgtcctgcagagcctgctccgcctggaggagcgctacgtaccccgcgcctcctacttccagtgcgtgcagcgggagatcaagccgcacatgcggaagatgctggcttactggatgctggaggtatgtgaggagcagcgctgtgaggaggaagtcttccccctggccatgaactacctggatcgctacctgtcttgcgtccccacccgaaaggcgcagttgcagctcctgggtgcggtctgcatgctgctggcctccaagctgcgcgagaccacgcccctgaccatcgaaaaactgtgcatctacaccgaccacgctgtctctccccgccagttgcgggactgggaggtgctggtcctagggaagctcaagtgggacctggctgctgtgattgcacatgatttcctggccttcattctgcaccggctctctctgccccgtgaccgacaggccttggtcaaaaagcatgcccagacctttttggccctctgtgctacagattatacctttgccatgtacccgccatccatgatcgccacgggcagcattggggctgcagtgcaaggcctgggtgcctgctccatgtccggggatganctcacaaanctgctggcagggatcactggcactgaagtggaantgcctgcgggcctgtcangaacaaatnaaactgcatnaaggnaaacntcaggaaaccgttnaaacanntcagccaangccaaancccccggggntcnnnancaanggnccaaccnaanaannatcctaaaanttnaaaaccnaancttttaccctgnaaaggcctntggaagggccataaaaaaaaag

SEQ ID NO: 6 - DNA, 1471 bp, Homo sapiens
  misc_feature (1)..(1): n is a, c, g, or t
  misc_feature (12)..(12): n is a, c, g, or t
  misc_feature (832)..(832): n is a, c, g, or t
  misc_feature (902)..(902): n is a, c, g, or t
  misc_feature (935)..(935): n is a, c, g, or t
  misc_feature (1362)..(1362): n is a, c, g, or t
  misc_feature (1400)..(1400): n is a, c, g, or t
  misc_feature (1436)..(1436): n is a, c, g, or t
  misc_feature (1441)..(1441): n is a, c, g, or t
ngggctcgcccnccctaagaatactagagaggatgcatcaccatcaccatcacggtcgacccacgcgtccgcccacgcgtccgcccacgcgtccgctccgatccagcgagcgctgcgtcctcgagtccctgcgcccgtgcgtccgtctgcgacccgaggcctccgctgcgcgtggattctgctgcgaaccggagaccatggccaaaccagcacagggtgccaagtaccggggctccatccatgacttcccaggctttgaccccaaccaggatgccgaggctctgtacactgccatgaagggctttggcagtgacaaggaggccatactggacataatcacctcacggagcaacaggcagaggcaggaggtctgccagagctacaagtccctctacggcaaggacctcattgctgatttaaagtatgaattgacgggcaagtttgaacggttgattgtgggcctgatgaggccacctgcctattgtgatgccaaagaaattaaagatgccatctcgggcattggcactgatgagaagtgcctcattgagatcttggcttcccggaccaatgagcagatgcaccagctggtggcagcatacaaagatgcctacgagcgggacctggaggctgacatcatcggcgacacctctggccacttccagaagatgcttgtggtcctgctccagggaaaccagggaggaggatgacgtagtgagcgaggacctggtacaacaggatgtccaggacctatacgaggcaggggaactgaaatggggaacagatgaagcccagttcatttacatcttgggaaatcgcagcaagcactcttccnggttgggggtccatgagtatctgaagaccacagggaagccgaatggaaccagcatcgaaggggacttgtncgggggactttgagaagctaatgctggccgtantgaaagggatcccgaagcccccggaatattttgctgaaaggctcttcaaggctatgaagggcctggggactccggaacaaaccctgatccccatcttggcccccggaagggagttgacatgctccacattccggaaatcttccggacaagtatgaaagtccctcaaccgatgatcagaatgacacctctgcaagaacaaaaatctgctgaacttcctggggaaatataattctctgccaattttcccgaggaacccagtgcccatcaaagggaacttacgcgggcccaaaaattaaagaaatggccccccccatgtctccccgaccaaaccaaaccttgaaaactaaagaatcccttaaaaaaaaccttttaatcccccccccattcccggaaaacccgacctcacttttttcggataataaacaangaatcttcacccccgttttgctttacccccctccctanaaaacggggcgccgaaaacatatctctccccccccnccccncagaaacctgactgtctactacccttcgct

SEQ ID NO: 7 - DNA, 1024 bp, Homo sapiens
  misc_feature (2)..(2): n is a, c, g, or t
  misc_feature (728)..(728): n is a, c, g, or t
  misc_feature (747)..(747): n is a, c, g, or t
  misc_feature (754)..(754): n is a, c, g, or t
  misc_feature (810)..(810): n is a, c, g, or t
  misc_feature (813)..(813): n is a, c, g, or t
  misc_feature (825)..(825): n is a, c, g, or t
  misc_feature (838)..(838): n is a, c, g, or t
  misc_feature (856)..(856): n is a, c, g, or t
  misc_feature (864)..(864): n is a, c, g, or t
  misc_feature (871)..(871): n is a, c, g, or t
  misc_feature (877)..(877): n is a, c, g, or t
  misc_feature (879)..(879): n is a, c, g, or t
  misc_feature (882)..(882): n is a, c, g, or t
  misc_feature (888)..(888): n is a, c, g, or t
  misc_feature (890)..(890): n is a, c, g, or t
  misc_feature (898)..(898): n is a, c, g, or t
  misc_feature (900)..(900): n is a, c, g, or t
  misc_feature (911)..(911): n is a, c, g, or t
  misc_feature (913)..(913): n is a, c, g, or t
  misc_feature (924)..(924): n is a, c, g, or t
  misc_feature (939)..(940): n is a, c, g, or t
  misc_feature (942)..(942): n is a, c, g, or t
  misc_feature (947)..(947): n is a, c, g, or t
  misc_feature (949)..(949): n is a, c, g, or t
  misc_feature (953)..(953): n is a, c, g, or t
  misc_feature (963)..(963): n is a, c, g, or t
  misc_feature (974)..(974): n is a, c, g, or t
  misc_feature (982)..(982): n is a, c, g, or t
  misc_feature (990)..(991): n is a, c, g, or t
  misc_feature (1000)..(1000): n is a, c, g, or t
  misc_feature (1005)..(1005): n is a, c, g, or t
  misc_feature (1011)..(1011): n is a, c, g, or t
  misc_feature (1013)..(1013): n is a, c, g, or t
  misc_feature (1024)..(1024): n is a, c, g, or t
antagagaaattactatgagaggatcgcatcaccatcaccatcacggatcctatttaggtgacactatagaatcgtcgacccacgcgtccggtgagcgtggggagctgccgccaccgcctgctcctcgtcgtcctcgtcctccggggccccggcgtcgtgggccgcgcatggccctggaagagaagtcggcgccccttcatccgcctctctctcaccgcgccgctcccgcctcctcattctgcgttgcgggctcaggcggaacccggaacggccgtcctcttaccccgccctccgccgccgcctcctcctcctcctccacctccacctccttctcttcctcctcctcggcttcctcctcagccccgggccggagcggggtgtcggcagcggccggttcgggcggcgactcgcgcttctctgggcggcggcgcttggccatgtcgtgtcggggaaggtaatgagccgcagagccccggggtctcggctgagcagcggcggcaccaactattcgcggagctggaatgactggcaacccagattgacttgatgcaaaacatcacaaaggctccatgttacacagtatgcgatttttgagaactgatagtgcatcagctgacccaggtaatttaaaatattcttcatccagagatagaggtggttcttcctcttacggactgcaaccttcaaattcagctgtggtgtctcggcaaaggcacgatgataccanagtccacgctgacatacanaatgacnaaaagggtggctacagtgtcaatggaggatctggggaaaatacttatggtcggaantcnttggggcaaganctgaagggttaanaatgtgaccagccctganttcaccantgttcancatggnantcntgcttnanccacaaananatgaggaaatnanaggaaaaatcnatgtcttattgtgannantctcnantgtnaatcttcttngaagatcaccnggaaaaanaaaaaaanngaaaattgntaatntaaaanantttaaaaaaan

SEQ ID NO: 8 - DNA, 888 bp, Homo sapiens
  misc_feature (1)..(888): n is a, c, g, or t
cnatgagaggatcgcatcaccatcaccatcacggatcctatttaggtgacactatagaatcgtcgacccacgcgtccgctccttcactctaccctaagaacacagatctatttgagatgattgagaagatgcagggaagcaggatggatgaacaacgctgctccttcccgccgcccctcaaaacagaggaggactacattccatacccgagcgtgcacgaggtcttggggcgagaaggacccttccccctcatcctgctgccccagtttgggggctactggattgagggcaccaaccacgaaatcaccagcatccccgagacagagccactgcagtcgcccacaaccaaggtgaagctcgagtgcaaccccacagcccgcatctaccggaagcactttctcggcaaggagcatttcaattactactcactggacactgccctcggccaccttgtcttctcactcaagtacgatgtcatcggggaccaagagcacctgcggctgctgctcaggaccaagtgccggacataccatgatgtcatccccatctcctgcctcaccgagttccctaatgttgtccagatggcaaagttggtgtgtgaagacgtcaatgtggatcggttctatccctgtgctctacccccaaggntnccgggctcatcgttcacctttngacgagcatgtcatcaagcaatnaacttccaagtttgggggtccttttatcagaaagcttngggnaanacctccngaggaanaaactnctttncgcncccaatgggggaaaagtcccccccttttcggggggngntcccttggaaatttccttggnccnagaaagggtcnnaanttggcagggacnttttaaagggggtttccngaagngaaggcc

SEQ ID NO: 9 - DNA, 1190 bp, Homo sapiens
  misc_feature (1)..(1190): n is a, c, g, or t
agaaattactatgagaggatcgcatcaccatcaccatcacggatcctatttaggtgacactatagaatcgtcgacccacgcgtccggtggcttcctggatgactgcgtcgatccctgctgtgattctttgacctgccagctgaggccaggtgcacagtgtgcatctgacggaccctgttgtcaaaattgccagctgcgcccgtctggctggcagtgtcgtcctaccagaggggattgtgacttgcctgaattctgcccaggagacagctcccagtgtccccctgatgtcagcctaggggatggcgagccctgcgctggcgggcaagctgtgtgcatgcacgggcgttgtgcctcctatgcccagcagtgccagtcactttggggacctggagcccagcccgctgcgccactttgcctccagacagctaatactcggggaaatgcttttgggagctgtgggcgcaaccccagtggcagttatgtgtcctgcacccctagagatgccatttgtgggcagctccagtgccagacaggtaggacccagcctctgctgggctccatccgggatctactctgggagacaatagatgtgaatgggactgagctgaactgcagctgggtgcacctggacctgggcagtgatgtggcccagcccctcctgactctgcctggcacagcctgtggccctggcctggtgtgtatagaccatcgatgccagcgtgtggatctcctgggggcacaggaatgtcgaagcaaatgccatggacatggggtctgtgacagcaacaggcactgctactgtgaggagggctgggcaccccctgactgcaccactcanctcaaagcaaccagctccctgaaccacagggctgctcctcagcctcctggtcttattggtcctggtgatgcttggtgccanctactggnaccgtgcccgcctgcacnancgantctgccaactcaagggacccacctgccantananggcaaccccaatctggntcccnctgaaanggccaanaacctccccaaaaggcccctgctggcacaagnactaaacaaggtaatgntntnaacttcccggnccccccnttcannccnttgcccctgaacctnntttcaaaaaaaatcnaatttnaaggggcnancaaacccccnnccccaaaaaaacnntnccnnncnaacccnan

SEQ ID NO: 10 - DNA, 911 bp, Homo sapiens
  misc_feature (1)..(911): n is a, c, g, or t
tagagaaattactatgagaggatcgcatcaccatcaccatcacggatcctatttaggtgacactatagaatcgtcgacccacgcgtccggggccctacaactgcaccctgagccggagctgcccagtcgccgcgggaccggggccgctggggtctggacgggggtcgccatgatccgctttatcctcatccagaaccgggcaggcaagacgcgcctggccaagtggtacatgcagtttgatgatgatgagaaacagaagctgatcgaggaggtgcatgccgtggtcaccgtccgagacgccaaacacaccaactttgtggagttccggaactttaagatcatttaccgccgctatgctggcctctacttctgcatctgtgtggatgtcaatgacaacaacctggcttacctggaggccattcacaacttcgtggaggtcttaaacgaatatttccacaatgtctgtgaactggacctggtgttcaacttctacaaggtttacacggtcgtggacgagatgttccttgctggcgaaatccgagagaccagccagacgaaggtgctgaaacagctgctgatgctacagtccctggagtgagggcaggcgagccccaccccggccccggcccctcctggactcgcctgctcgcttccccttcccaggcccgtggccaacccagcagtccttccctcagctgcctaggaggaagggacccagctgggtctgggccacaagggaggagactgcaccccactgcctctgggccctggctgtgggcagaggccaccgtgtgtgtcccgagtaaccgtgccgttgtcgtgtgatgccataaagcgtctgtgcgtggantccccaataaacctgtggtcctgcctggcnaaaanaaaannnnnnnnnnnnnnnnnnnnnn

SEQ ID NO: 11 - DNA, 1146 bp, Homo sapiens
  misc_feature (1)..(1146): n is a, c, g, or t
taattagagananttactatgagaggatcgcatcaccatcaccatcacggatcctatttaggtgacactatagaatcgtcgacccacgcgtccggcctggggagccgtcttggcctgcgcgggtgcttcggcgccgccaggctcctgtatccccgtttccagagccgcggccctcagggcgtggaagacggggacaggccacagccttcctcgaagacacccaggatccccaagatttacaccaaaacgggagacaaagggttttctagtaccttcacaggagaaaggagacccaaagatgaccaagtgtttgaagccgtgggaactacagatgaattaagttcagctattgggtttgctctggaattagtcacagaaaagggccatacatttgccgaagagcttcagaaaatccagtgcacattgcaggacgtcggctcggccctggcgacaccatgctcctcggcccgggaggctcacttaaagtataccacgttcaaggcggggcccatcctggagctggagcagtggatcgacaagtacaccagccagctcccaccactcacggccttcatcctgccttcgggaggcaagatcagctcggcgctgcatttctgccgggccgtgtgccgccgggccgagagacgtgtggtgcctcttgtccagatgggagagaccgatgcgaacgtggccaagttcttaaacagactcagtgactatctcttcacgctagccagatatgcagccatgaaggaggggaatcaagagaaaatatacaagaaaaatgacccatcggccgagtctgagggactctgaaatcacagaaagtgggagcttggangatccctccatggcgatggccgtgnaaagagaaacttgcccttctggggtcctggttcctgaagagctcncccananaggctcaaagcancntttttgtcccagcctcagcttttgatttacccttctngccnccttcctcaagggantgnggaaccntttggggatttttgtccctgaacctgnttcccaannttncntgggttttggaagnatngggaantaattnggctttgcagaaaaannggtnaatnnnttgntccantnaaaagaacntggngaaaaanaanaaatttgnaagngtgg

SEQ ID NO: 12 - DNA, 897 bp, Homo sapiens
  misc_feature (1)..(897): n is a, c, g, or t
nanctntgagaggatcgcatcaccatcaccatcacggatcctatttaggtgacactatagaatcgtcgacccacgcgtccgagacagtgaagagggtcctgggtttctcagagcctacggtggtcacagcagcattgaactgtgtggggaagggcatggacaagaagaaggcagccgatcatctgaaaccttttcttgatgattctactctccgatttgtggacaaactgtttgaggctgtggaggaaggccgaagctctaggcattccaagtctagcagtgacaggagcagaaaacgagagctaaaggagttccaggaagcgctcgcccctggccgaggatatgtccttgcaaaacacgagccctcctagtgaagaggggatgtcacccaaagcctaccaccggaggtgtttggtgatgactctgagatctctaaagaatcatcaggagtaaagaagcgacgaataccccgttttgaggaggtggaagaagagccagaggtgatccctgggcctccatcagagagccctggccatgctgactaagctccagatcaaacagatgatggaggcagcaacacgacaaatcgaggagaggaaaaaacagctgagcttcattagccccccctacaccttcaggccaaaaaactcctttntttcctccccaancaanaacggactttccntnttggncaaacncctatttcnaggcccttccccagggntngccccctttttcnntgaaatnnatggccctttgaagaaaggcnaagggaaaagnnancntggaanctggcnagccttcgnaattccaanncccccagncttggcnactggaannccnaggncnnttttnggggaaantggcccaannatngggggggncccgggnnttaaa

SEQ ID NO: 13 - DNA, 856 bp, Homo sapiens
  misc_feature (1)..(856): n is a, c, g, or t
atttagagaaaattacttatgagaggatcgcatcaccatcaccatcacggtatcctatttaggtgacactatagaatcgtcgacccacgcgtccgcgggagggcagggccgacggacggcgggcggcggcggcggtggcggcgctggagtcggcgcgggtgctggcgccatggaggccgagcggggtcccgagcgccggcctgcggagcgtagcagcccgggccagacgccggaggagggcgcgcaggccttggccgagttcgcggcgctgcacggcccggcgctgcgcgcttcgggggtccccgaacgttactggggccgcctcctgcacaagctggagcacgaggttttcgacgctggggaagtgtttgggatcatgcaagtggaggaggtagaagaggaggaggacgaggcagcccgggaggtgcggaagcagcagcccaacccggggaacgagctgtgctacaaggtcatcgtgaccagagagagcgggctccangcagcccaccccaacagcatcttcctcatcgaccacgcctggacgtgccgtgtggancatgcgcgccagcagctgcaacaggtgcccggnctgctgcaccgcatggccaacctgatggncattgatttccacggtganctgcccagtacataagctntggncctgntgctggangagatgtggaanttcaaccanacctactanctggcccatgggacagctganganaagangccggtgtgntanatcntggactanttcagttcncngatccatcaatccgnanntgcccaaacttcacnannccaaccttctttnnaaaattgccanaaancaanttnncntaacncnctnntn

SEQ ID NO: 14 - DNA, 1222 bp, Homo sapiens
  misc_feature (1)..(1222): n is a, c, g, or t
nnattagagaaattactatgagaggatcgcatcaccatcaccatcacggatcctatttaggtgacactatagaatcgtcgacccacgcgtccgcccacgcgtccgagaacgtggagatggtggagggggaccaggggcagatgtgcatcaacatggagtggggggcctttggggacaacgggtgtctggatgatatcaggacacactacgacagactggtggacgaatattccctaaatgctgggaaacaaaggtatgagaagatgatcagtggtatgtacctgggtgaaatcgtccgcaacatcttaatcgacttcaccaagaagggattcctcttccgagggcagatctctgagacgctgaagacccggggcatctttgagaccaagtttctctctcagatcgagagtgaccgattagcactgctccaggtccgggctatcctccagcagctaggtctgaatagcacctgcgatgacagtatcctcgtcaagacagtgtgcggggtggtgtccaggagggccgcacagctgtgtggcgcaggcatggctgcggttgtggataagatccgcgagaacagaggactggaccgtctgaatgtgactgtgggagtggacgggacactctacaagcttcatccacacttctccagaatcatgcaccagacggtgaaggaactgtcaccaaaatgtaacgtgtccttcctcctgtctgaggatggcagcggcaagggggccgccctcatcacggccgtgggcgtgcggttacgcacagaggcaagcagctaagagtccgggatccccagcctactgcctctccagcacttctctcttcaagcggcgaccccctaccctcccagcgagttgcgctggnagacgctggcgccagggcctgccggcgcggggaaggaaagcaaaatccaactaatggtatatattgtagggtacanaatanagcgggngctgtnganaatatctctcacccggatnccctcctcacttgccctgnccctttgcatggtttgattttgacctggnccccncgtgngaangggaagggcctccatttcaangnangcnttccccnacaaantntttnttggctggaaaggaaantcnnccngtgnngngaatcnacnagttngatttgaacccncatcnntttncccccaaagggaatttgacttnngaggtntccccaaccnggacttccctnccctncg

SEQ ID NO: 15 - DNA, 916 bp, Homo sapiens
  misc_feature (1)..(916): n is a, c, g, or t
gagaggatcgcatcaccatcaccatcacggatcctatttaggtgacactatagaatcgtcgacccacgcgtccgggatggagaaggccttgagtcaattggccctgcgctctgctgcgcccagcagccccgggtctcccaggccagcactgccggctaccccaccagccaccccgcctgcagcctctcccagtgctctgaagggggtgtcccaggatctgctggagcggatccgagccaaggaggcacagaagcagctggcacagatgacgcggtgcccggagcaggagcagcggctgcagcgcttagaacggctgcctgagctggcccgcgtgctgcggagcgtctttgtgtccgaacgcaagcctgcgctcagcatggaggtggcctgtgccaggatggtgggcagctgttgtactatcatgagccctggggaaatggagaagcacctgctgctcctctccgagctgctgccggactggctcagcctccaccgcatccgcaccgacacctacgtcaagctggacaaggccgcggacctcgcccacatcactgcacgcctggcccaccagacacgtgctgaggaggggctgtgagcctgggggccactgtggacagacgtgggcttcagaagctcgctggcctgggcccaccagcattttcttttatgaacatgatacactttggccttcctttccccagcgcccctgagggccagaggcagatgtgggctgcaggctgcacagcccgagggtctctggctgcgggcggtgggccccttcatggggctcacctggtgcattcacattaaaccggtttctgtgggcacctctgtccttgctgctggtggggaagggaagccagatccagcaccccctggggggccatcgggagtgtggctgggggtgaagggggct

SEQ ID NO: 16 - DNA, 1147 bp, Homo sapiens
  misc_feature (1)..(1147): n is a, c, g, or t
naatagagaaattaactatgagaggatcgcatcaccatcaccatcacggatcctatttaggtgacactatagaatcgtcgacccacgcgtccggtgatgtgtccaatctagatcccaacttctcatttgaaggcaccaaactggatgtggggaacattgtgctggcattatacagcggcctctttgcctatggaggatggaattacttgaatttcgtcacagaggaaatgatcaacccctacagaaacctgcccctggccatcatcatctccctgcccatcgtgacgctggtgtacgtgctgaccaacctggcctacttcaccaccctgtccaccgagcagatgctgtcgtccgaggccgtggccgtggacttcgggaactatcacctgggcgtcatgtcctggatcatccccgtcttcgtgggcctgtcctgcttcggctccgtcaatgggtccctgttcacatcctccaggctcttcttcgtggggtcccgggaaggccacctgccctccatcctctccatgatccacccacagctcctcacccccgtgccgtccctcgtgttcacgtgtgtgatgacgctgctctacgccttctccaaggacatcttctccgtcatcaacttcttcagcttcttcaactggctctgcgtggccctggccatcatcggcatgatctggctgcgccacagaaagcctgagcttgagcggcccatcaaggtgaacctggccctgcctgtgttcttcatcctggcctgcctcttcctgatcgccgtctccttctggaagacacccgtggagtgtggcatcggcttcaccatcatcctcagcgggctgcccgtctacttcttcggggtctggtggaaaaaacaagcccaagtggctcctccagggcatcttctccacgaacngtcctgtgtcaaaanctcatgcaggtggtcccccaggananataaccaagaagccnaatggctgccggangaacatgcccaaangccanttaaannaaatcacctcctcnaaccactcggnttcccgnaaccaaanttaantgcccatccnantncntcnccgtccctccaagtcgggaanggaagctgctgtaaaaatctggnaaaaatctcatccctnantgaggncangnancc

SEQ ID NO: 17 - DNA, 980 bp, Homo sapiens
  misc_feature (1)..(980): n is a, c, g, or t
ctatgagaggatcgcatcaccatcaccatcacggatcctatttaggtgacactatagaatcgtcgacccacgcgtccgccggcactgcgcacttgccagccagtccgcccgtccggagcccggctcgctggggcagcatggcggggtcgccgctgctctgggggccgcgggccgggggcgtcggccttttggtgctgctgctgctcggcctgtttcggccgccccccgcgctctgcgcgcggccggtaaaggagccccgcggcctaagcgcagcgtctccgcccttggctgagactggcgctcctcgccgcttccggcggtcagtgccccgaggtgaggcggcgggggcggtgcaggagctggcgcgggcgctggcgcatctgctggaggccgaacgtcaggagcgggcgcgggccgaggcgcaggaggctgaggatcagcaggcgcgcgtcctggcgcagctgctgcgcgtctggggcgccccccgcaactctgatccggctctgggcctggacgacgaccccgacgcgcctgcagcgcagctcgctcgcgctctgctccgcgcccgccttgaccctgccgccctcgcagcccagcttgtccccgcgcccgtccccgccgcggcgctccgaccccggcccccggtctacgacgacggccccgcgggcccggatgctgaggaggcaggcgacgagacacccgacgtggaccccgagctgttgaggtacttgctgggacggattcttgcgggaagcgcggactccgagggggtggcagccccgcgccgcctccgccgtgccgccgaccacgatgtgggctctgagctgccccctgagggcgtgctgggggcgctgctgcgtgtgaaacgcctagagaccccggcgccccaggtgcctgcacgccgcctcttgccaccctgagcactgcccggatcccgtgcaccctgggacccagaagtgcccccgccatcccgccaccag

SEQ ID NO: 18 - DNA, 819 bp, Homo sapiens
  misc_feature (1)..(819): n is a, c, g, or t
atnannangaaaatnactatgagaggatcgcatcaccatcaccatcacggatcctatttaggtgacactatagaatcgtcgacccacgcgtccgaaaggcgcggcggggaggggagccggggccccagccctgccgggaaacgggttcccagtcccggccgagagcgcgggcgccgaggggaccgacccggactccccgcaaccccccaaccgccaggccatggcgcccacggggctcctggtggccggcgcctccttcctcgcgttccgggggctgcactgggggttgcggcggctgcccacgccggaatcggccgctcgggaccgctggcagtggtggaacctctgcgtctccctggcgcacagcctgctctcggggaccggggcgctgctcggcctgtcactgtaccctcagatggccgccgaccccatccatggccacccgcgctgggctctggtgctggtggctgtgtctgtgggttacttcctggcagacggagctgacctgctgtggaaccanaccttgggcaagacctgggatcttctctgtcatcatttggtggtggtgagctgcctcancaccgctgttctgtctggccactacntgggcttctccatggtgtctctgctcctgnaactgaactccannctgggcaacaaantgagactcttgtctctaannaaaaaaaaaaaaaangaanaactggnanttttctganatanattcataaantcttcttcntccctgntgnttntgctgnntttttttntgttgaaaaaaanccnttcnttccaaaanatntaanttaatngnaaatn

SEQ ID NO: 19 - DNA, 1206 bp, Homo sapiens
  misc_feature (1)..(1206): n is a, c, g, or t
attagagaaattactatgagaggatcgcatcaccatcaccatcacggatcctatttaggtgacactatagaatcgtcgacccacgcgtccggcgggttcgaaccgccggagctgagcgagaggccgggggtgccgagccgggcggggagagctgggccgggagagcagaacagggaggctagagcgcagcgggaaccggcccggagccggagccggagccccacaggcacctactaaaccgcccagccgatcggcccccacagagtggcccgcgggcctccggccgggcccagtcccctcccgggccctccatggcccgggccgctgccctcctgccgtcgagatcgccgccgacgccgctgctgtggccgctgctgctgctgctgctcctggaaaccggagcccaggatgtgcgagttcaagtgctacccgaggtgcgaggccagctcgggggcaccgtggagctgccgtgccacctgctgccacctgttcctggactgtacatctccctggtgacctggcagcgcccagatgcacctgcgaaccaccagaatgtggccgccttccaccctaagatgggtcccagcttccccagcccgaagcctggcagcgagcggctgtccttcgtctctgccaagcagagcactgggcaagacacagaggcagagctccaggacgccacgctggccctccacgggctcacggtggaggacgagggcaactacacttgcgagtttgccaccttccccaaggggtccgtccgagggatgacctggctcagagtcatagccaagcccaagaaccaagctgangcccanaaggtcacgttcagccaggaccctacgacagtggccctctgcatctccaaaganggccgcccacctgcccggatctcctggctctcatcctgnangggaaccaaaaaantcangtgtcaggnacctggccggaactgtcactgtcaccaaccgcttcacttggtgccctcggncnannaaatgtntnacgntcccttgnaagtgaaaatgaaanntttaaaaaacnncctganactggganccttttttacctaccctctgaatntcnnttccggttnaaaaanaattgtactcgncgtatgatgcnccctgaattnnaattcnnaanaacccaaaccnnggttttnttggaaaaacttnggnctttccaactccnatggccnggntc

SEQ ID NO: 20 - DNA, 946 bp, Homo sapiens
  misc_feature (1)..(946): n is a, c, g, or t
catcaccatcaccatcacggatcctatttaggtgacactatagaatcgtcgacccacgcgtccgccaaagaagattctaaacttatagctctcatatggcccagtgagtggcaaatgatacaaaagctctttgttgtggatcatgtaattaaaatcacgagaattgaagtgggagatgtaaacccttcagaaacacagtatatttctgagcccaaactctgtccagaatgcagagaaggcttattgtgtcagcagcagagggacctgcgtgaatacactcaagccaccatctatgtccataaagttgtggataataaaaaggtgatgaaggattcggctccggaactgaatgtgagtagttctgaaacagaggaggacaaggaagaagctaaaccagatggagaaaaagatccagattttaatcaaagcaatggtggaacaaagcggcaaaagatatcccatcaaaattatatagcctatcaaaagcaagttattcgccgaagtatgcgacatagaaaagttcgtggtgagaaagcacttctcgtttctgctaatcagacgttaaaagaattgaaaattcagatcatgcatgcattttcagttgctccttttgaccagaatttgtcaattgatggaaagattttaagtgatgactgtgccaccctaggcacccttggcgtcattcctgaatctgtcattttattgaaggctgatgaaccaattgcagattatgctgcaatggatgatgtcatgcaagtttgtatgccagaagaagggtttaaaggtactggtcttcttggacattaatctttgaatacttgctgactgctaagaaatgaccagaggggaagaggagtttgacatgttagggcattaaagcaaaggtggatttagaattaaccattacatgccccttccaaaggcagaatccattcaacgtgactgt

SEQ ID NO: 21 - DNA, 1216 bp, Homo sapiens
  misc_feature (1)..(1216): n is a, c, g, or t
atagagaaattactatgagaggatcgcatcaccatcaccatcacggatcctatttaggtgacactatagaatcgtcgacccacgcgtccgccatgtccttgaagcttcaggcaagcaatgtaaccaacaagaatgaccccaagtccatcaactctcgagtcttcattggaaacctcaacacagctctggtgaagaaatcagatgtggagaccatcttctctaagtatggccgtgtggccggctgttctgtgcacaagggctatgcctttgttcagtactccaatgagcgccatgcccgggcagctgtgctgggagagaatgggcgggtgctggccgggcagaccctggacatcaacatggctggagagcctaagcctgacagacccaaggggctaaagagagcagcatctgccatatacagtggctacatctttgactatgattactaccgggacgacttctacgacaggctcttcgactaccggggccgtctgtcgcccgtgccagtgcccagggcggtccctgtgaagcgaccccgggtcacagtccctttggtccggcgtgtcaaaactaacgtacctgtcaagctctttgcccgctccacagctgtcaccaccagctcagccaagatcaagttaaagagcagtgagctgcaggccatcaagacggagctgacacagatcaagtccaatatcgatgccctgctgagccgcttggagcagatcgctgcggagcaaaaggccaatccagatggcaagaagaagggtgatggaggtggcgccggcggcggcggcggtggtggtggcancggtggcggtggcagtggtggtggcggtggcggtggcancanccggccaccagccccccaagagaacacaacttctgaggcaggcctgccccagggggaancacggacccganacgacggcgatgagnaaaggctcctgacacacagcgaggaananctggaacacagccagganacaaacncgnatganggggccnttgcantaancancctgannggancantggccacnaccaggtgaanggcatngnttgccccaggcctcaancngggcaccaaccctggatgccccccccancgggtaccaaaanaaactggnannagggncctcctccccaangaatccaaccanggcnatgttctttgcaggggaattangggcnnattcttcccnagaacccncctntn

SEQ ID NO: 22 - DNA, 978 bp, Homo sapiens
  misc_feature (1)..(978): n is a, c, g, or t
taactatgagaggatcgcatcaccatcaccatcacggatcctatttaggtgacactatagaatcgtcgacccacgcgtccggcagctcagagccagaggagtggtgcccgccaatgcctgagagaagtcacctgacggagcccagctccagtggagggtgcctggtcaccccatcccgaagggaaaccccctctcccacaccttcctatggacagcagtccacagccactcttacaccctcacctcctgaccctccccagcccccaactgacatgccccatctccatcagatgcccaggagggtgccccttgggccgagttcccctctcagtgtatcccagcccatgctgggcatccgtgaagcgaggcctgctggcttgggtgctggccctgcagcctcaccccacctcagccccagtcctgcccctagcacagccagcagtgccccaggcagaacctggcaggggaatggggagatgactcccccacttcaaggaccccgtgctcgattccggaagaaacccaaggctcttccctacaggagggagaacagtcctggggacttgcccccaccacccttgccaccgccagaggaagaggcgagctgggccctagagctgagggcagcaggcagcatgtcctccctggagcgggagcgcagtggggagaggaaagcggtccaggccgtgcccctggcagcccagcgggtgctccacccagatgaagaggcctggctcccatacagcagaccaagcttcctgtcccggggccagggcaccagcacatgttccacggccggcagcaactcttccaggggctccagcagctctaggggctcccggggccctggccggagccggagtcggagtcagagccggagccagagccaaagggccaggacagaaacgccgagaggaaccaagatgacccttgttggggcattgagaatatcatgagtgccacggggaaggggagtag

SEQ ID NO: 23 - DNA, 1150 bp, Homo sapiens
  misc_feature (1)..(1150): n is a, c, g, or t
tagagaaattaactatgagaggatcgcatcaccatcaccatcacggatcctatttaggtgacactatagaatcgtcgacccacgcgtccgcgggctatgacctgaagcagctgttcatcgggtcggagggcactttggggatcatcaccacggtgtccatcttgtgtccacccaagcccagggctgtgaacgtggctttcctcggctgcccaggctttgctgaggttctgcagaccttcagcacctgcaaggggatgctgggtgagatcctgtctgcattcgagttcatggatgctgtgtgcatgcagctggtcgggcgccatctccacctggccagcccggtgcaagagagtccgttttacatcctcatcgagacttcaggctccaacgcaggccatgacgctgagaagctgggccacttcctggagcacgcgctgggctccggcctggtgaccgatgggaccatggccaccgaccagaggaaagtcaagatgctgtgggccctgagggaaaggatcacagaggcgctgagccgggatggctacgtgtacaagtacgacctctccctccctgtggagcggctctacgacatcgtgactgacctgcgcgcccgcctcggcccgcacgccaagcacgtggtgggctatggccaccttggagatggtaacctgcacctcaatgtgacggcggaggccttcagcccctcgctcctggctgccctggagccccacgtgtacgagtggacggccgggcagcagggcagcgtcagcgcggaacacggagtgggcttcaggaagagggacgtcctgggctacagcaagccaccgggggccctgcagctcatgcagcanctcaagncctgctggaccccaagggcatcctcaacccctacaaangctgcccagccaggcctgacggccactcctgctgctgccaagnccantgggggtcggcgggtggctctcggncgggggtgttncngtggctctnangnaaaaccggcacgggcagggaacagcacctgntnaangactggaacccncctgggnantgccgancagncctcggcagaaattngnaaaatggggggngnagnacctctttnngggagggggccttgcacctctgaangcnggngggnnnttnccng

SEQ ID NO: 24 - DNA, 1061 bp, Homo sapiens
  misc_feature (1)..(1061): n is a, c, g, or t
tagagagaattactatgagaggatcgcatcaccatcaccatcacggatcctatttaggtgacactatagaatcgtcgacccacgcgtccgcccacgcgtccgatgtaggcaccggtccgagtgcctgccctctgtccccgcggctgggtctcgtctgctccggttcctgggctcctaattcttggtccagcttcttccaggacaggaaaaggaggggaaatctcgacatggaaaaactctacagtgaaaatgaaggaatggcttcaaaccaaggaaagatggaaaatgaagaacagccacaagacgagagaaagccagaagtaacttgtactctggaagacaagaagttagaaaacgagggaaagacagaaaacaagggcaaaacaggagatgaggaaatgttaaaggataaaggaaagccagagagtgagggagaggcaaaagaaggaaagtcagagagggagggagagtcagagatggagggaggatcagagagagagggaaaaccagagatagagggaaagccagagagtgaaggagagccagggagtgaaacaagggctgcaggaaagcgcccagctgaggatgatgtacccaggaaagccaaaagaaaaactaataaggggctggctcattacctcaaggagtataaagaggccatacacgatatgaatttcagcaatgaggacatgataagagaatttgacaatatggctaaggtgcaggatgagaagagaaaaagcaaacagaaattgggggcgtttttgtggatgcaaagaaatttacaggaccccttctaccctagaggtccaagggaattcaggggtggctgcagggccccacgaagggacattgaagacattccttatgtgtagtgtccctggcaggcatttaccaggccatgtgctttaccgttacggtaatactttactttaggcatccctcctgttgctagcanccttttgacctatctgcatgcagtgttctcagtagnaatgttcctctgttacatggaaaaattgttgatggtgcnttgtaaattaaaaacccacttgcnaacc

SEQ ID NO: 25 - DNA, 984 bp, Homo sapiens
  misc_feature (1)..(984): n is a, c, g, or t
antagagaaattactatgagaggatcgcatcaccatcaccatcacggatcctatttaggtgacactatagaatcgtcgacccacgcgtccgacaagatggccgctgcgcgcccagaggcccagagtcggagctcaccgactccggagtcgcgatcccaggagccactggacctggtcctggtgcctgatgactgccggcctggcacacccccgagtgacctcatcgagatccaggtggtgaaggtgacggacaccacgctggtccctgagcccccggagccaggttctttccactgtgccttgtgccctgctgccttccggctggtttccgagctgctgttccacgaacatggccacttggctggggccgagggaggcgggcagggtggggacccgagccggtgccacgtgtgcggccacagctgcccgggccccgccagcctgcgcgcgcactacagcttgcacacgggggagcggccctaccgctgcgcgctctgcccccgcgccttcaaggccttggcgcccctgctccggcaccagcaccggcacggggtggagccgggcacctctcggaggcctccggacacagcggccgttgcagaacagaggcccggggtggccccggagagggcggaggtggtgatggcggcggcggcggcgggcgcancggtggggaagccttttgcctgcaggttctgcgccaagcccttccgccgctcctcanacatgcgagaccacgagcgcgtgcacactggcgagcggccataccattgcggcatctgcggcaagggcttcacccagtcctcggtgcttancggccacgcccgcatccacactggcgaagcgcccgttccgctgcacgctctgcgancgcaccttcaacaactcctccaacttccgcaagcaccancgcacccacttncanggnccggggncnggggctggnaaantctgnaggccanntggctcntcnnnnntnaagnn

SEQ ID NO: 26 - DNA, 545 bp, Homo sapiens
  misc_feature (1)..(545): n is a, c, g, or t
tagagaaattactatgagaggatcgcatcaccatcaccatcacggatcctatttaggtgacactatagaatcgtcgacccacgcgtccgccgcgctaaagccgctgctgccgcggaagacgatcctccagtacccgcccgccgtcaccgcagctgccgtgtcctcctcccacccctagccgcaccccctcgcggggggatcagctgagcggccaaacggcacggtcgggggagccccgagtccgcagctgcagcggggcctgagaccagagttggcgagggcaaggaaggagcggccccgggcagtgggggcggggccgggcgggcccgagaacagccgaatttggccgagcgctgccgagcgagtccgaggcgctgggccaggccggagccggactacgggagccgaggcnggccgcgcggtggncgcggagaggagnggagcgncncggcaggccggncgggtggcggcagcatnngangaggccgnanttgngggtccnatgancgaangcaactcnngtgttgtnngtnggccggttgncn

SEQ ID NO: 27 - DNA, 732 bp, Homo sapiens
  misc_feature (98)..(98): n is a, c, g, or t
  misc_feature (107)..(107): n is a, c, g, or t
  misc_feature (114)..(114): n is a, c, g, or t
  misc_feature (120)..(120): n is a, c, g, or t
  misc_feature (123)..(123): n is a, c, g, or t
  misc_feature (128)..(128): n is a, c, g, or t
  misc_feature (143)..(143): n is a, c, g, or t
  misc_feature (165)..(165): n is a, c, g, or t
  misc_feature (171)..(171): n is a, c, g, or t
  misc_feature (173)..(173): n is a, c, g, or t
  misc_feature (177)..(177): n is a, c, g, or t
  misc_feature (179)..(179): n is a, c, g, or t
  misc_feature (188)..(188): n is a, c, g, or t
  misc_feature (212)..(212): n is a, c, g, or t
  misc_feature (214)..(215): n is a, c, g, or t
  misc_feature (217)..(217): n is a, c, g, or t
  misc_feature (220)..(220): n is a, c, g, or t
  misc_feature (223)..(223): n is a, c, g, or t
  misc_feature (228)..(229): n is a, c, g, or t
  misc_feature (236)..(236): n is a, c, g, or t
  misc_feature (248)..(249): n is a, c, g, or t
  misc_feature (251)..(251): n is a, c, g, or t
  misc_feature (269)..(269): n is a, c, g, or t
  misc_feature (282)..(282): n is a, c, g, or t
  misc_feature (288)..(288): n is a, c, g, or t
  misc_feature (296)..(296): n is a, c, g, or t
  misc_feature (306)..(306): n is a, c, g, or t
  misc_feature (324)..(325): n is a, c, g, or t
  misc_feature (335)..(337): n is a, c, g, or t
  misc_feature (363)..(363): n is a, c, g, or t
  misc_feature (371)..(371): n is a, c, g, or t
  misc_feature (377)..(377): n is a, c, g, or t
  misc_feature (383)..(383): n is a, c, g, or t
  misc_feature (392)..(392): n is a, c, g, or t
  misc_feature (398)..(398): n is a, c, g, or t
  misc_feature (414)..(414): n is a, c, g, or t
  misc_feature (418)..(418): n is a, c, g, or t
  misc_feature (426)..(426): n is a, c, g, or t
  misc_feature (455)..(456): n is a, c, g, or t
  misc_feature (463)..(463): n is a, c, g, or t
  misc_feature (470)..(470): n is a, c, g, or t
  misc_feature (472)..(472): n is a, c, g, or t
  misc_feature (476)..(476): n is a, c, g, or t
  misc_feature (504)..(504): n is a, c, g, or t
  misc_feature (512)..(512): n is a, c, g, or t
  misc_feature (516)..(516): n is a, c, g, or t
  misc_feature (538)..(538): n is a, c, g, or t
  misc_feature (544)..(544): n is a, c, g, or t
  misc_feature (570)..(570): n is a, c, g, or t
  misc_feature (572)..(572): n is a, c, g, or t
  misc_feature (584)..(584): n is a, c, g, or t
  misc_feature (597)..(597): n is a, c, g, or t
  misc_feature (614)..(614): n is a, c, g, or t
  misc_feature (633)..(633): n is a, c, g, or t
  misc_feature (635)..(635): n is a, c, g, or t
  misc_feature (655)..(655): n is a, c, g, or t
  misc_feature (700)..(700): n is a, c, g, or t
  misc_feature (715)..(715): n is a, c, g, or t
  misc_feature (724)..(724): n is a, c, g, or t
  misc_feature (730)..(730): n is a, c, g, or t
tagagaaattactatgagaggatcgcatcaccatcaccatcacggatcctatttaggtgacactatagaatcgtcgacccacgcgtccggggaggggngcccgaggncgttgcngacctnggngctanagccgctgctgcctnggaagacagatcctccagtacncgcctncngtcngngcagagtgncgtgtcctcctcccacccctagcngnncnccntcncgganngatttcntaaacggccttnngncactagtcgatccgagcngccgccatccgtnactgcntgggttgntgacactccngttggcaaggtccactgnngagctatccnnngacaagattttctcaaccgggaaggnctgcaaantctgtnaatttngacgctggnggcgcngggctgctgatggttnaggnggaactcncaaaccttgccgaggtgtcctgcctctgnntgtccantcccccnanagcnagcagggactctgctccaccactagatnacaaaggnctgnacgaaacccgggctcctcaggntgtccnaggtgtcctggtctgaagagtgttcnanagaattctctcnaagagacgctgcnacctgtgcctggatcancctcctaggctctcatgantnagaataaacaggcagcccantgacatcccgggatgagagagcatcacctatagaccccctcctgncttctaagttagccngtgcctgangctgcngg

SEQ ID NO: 28 - DNA, 853 bp, Homo sapiens
  misc_feature (1)..(853): n is a, c, g, or t
antagagaaattactatgagaggatcgcatcaccatcaccatcacggatcctatttaggtgacactatagaatcgtcgacccacgcgtccggcctcgccagctcgccccggcactgcgcacttgccagccagtccgcccgtccggagcccggctcgctggggcagcatggcggggtcgccgctgctctgggggccgcgggccgggggcgtcggccttttggtgctgctgctgctcggcctgtttcggccgccccccgcgctctgcgcgcggccggtaaaggagccccgcggcctaagcgcagcgtctccgcccttggctganactggcgctcctcgccgcttccggcggtcagtgccccgaggtgaggcggcgggggcggtgcaggagctggcgcgggcgctggcgcatctgctggaggccgaacgtcaggagcgggcgcgggccgaggcgcaggaggctgaggatcagcaggcgcgcgtcctggcgcagctgctgcgcgtctggggcgccccccgcaactctgatccggctctgggcctggacgacnaccccgacgcgcctgcagcgcagctcgctcgcgctctgctccgcgcccgccttgaccctgccgccctcgcagcccagcttgtccccgcgcccgtccccgccgcggcgctccgaccccggcccccggtctacaacgacggccccgcgggcccggatgctgaagangcaggcnacaanacacccgacgtggaacccgaactgttgaagtacttgctgggacggattcttgcngnaaacgcggactccnaaggggtggnanccccnngncnnctncnncntgncnncnaacaanaatgtnggnctctg

SEQ ID NO: 29 - DNA, 1311 bp, Homo sapiens
  misc_feature (1)..(1311): n ia a, c, g, or t
nntagaggnaattnctatgagaggatcgcatcaccatcaccatcacggatcctatttaggtgacactatagaatcgtcgacccacgcgtccgcccacgcgtccgcccggcgcgacccgcaggagcgtagagagcgcgggactagagtgcagagctccgggacgtggatcggagccggcgcgatgggcggagagcaggaggaggagcggttcgacggcatgttgctggccatggctcagcagcacgagggcggcgtgcaggagcttgtgaacaccttcttcagcttccttcgacgcaaaacagactttttcattggaggagaagaagggatggcagagaagcttatcacacagactttcagccaccacaatcagctggcacagaagacccggcgggagaagagagcccggcaggaggccgagcggcgggagaaggcggagcgggcggccagactggccaaggaagccaagtcagagacctcagggccccagatcaaggagctaactgatgaagaggcagagaggctgcagctagagattgaccagaaaaaggatgcagagaatcatgaggcccagctcaagaacggcagccttgactccccagggaagcaggatactgaggaagatgaggaggaagatgagaaggacaaaggaaaactgaagcccaacctaggcaacggggcagacctgcccaattaccgctggacccagaccctgtcggagctggacctggcggtccctttctgtgtgaacttccggctgaaagggaaggacatggtggtggacatccagcggcggcacctccgggtggggctcaaggggcagccagcgatcattgatggggagctctacaatgaagtgaaggtggagganagctcgtgnctcattgaggacggcaaggtggtgactgtgcntctgganaanatcataaaatggantggtgganccncttggtgtccagtgaccctgaaatcaacaccaaaaanattacccntganaatttcnaagctgttcaaacctgaacagtgaaactcccaccctngggnaaaaaatgatgtttgacccccganananttcnctggggctttccacntnccaaccaaaccnaaaaaannggaattnttgaaaaanttnttggattcaccttcgnaaatgaatttttcccagggctaaattnacctaacccctntttttttnccccntgaaannttgggggtaaattgaanccncccnanttttttnccctntttnttggnaatttggnccccaggctttgggcannaaggaatngcnccnnccncanttcccgggnt

SEQ ID NO: 30 - DNA, 911 bp, Homo sapiens
  misc_feature (1)..(911): n is a, c, g, or t
attagaggngaattactatgagaggatcgcatcaccatcaccatcacggatcctatttaggtgacactatagaatcgtcgacccacgcgtccgcccacgcgtccgcccacgcgtccgtgagggttgaggctcacccagagaacaacaggcccatcatacagatcccgtccactgaaggtgaaggcagtggctcctggaagtggaaagcccctgaaaagggcagccttcgccaaacttacgagctcaacgatctcaacagggactcagaaagctgtgagtctctgaaagacagctttggttctggagatcgcaagagaagcaacattgatagcaatgagcatcaccaccacggaattaccaccatccgcgtcaccccagtagagggcagcgaaattggctcagagacgctgtccatttcttcttcccgcgactccaccctgcggagaaagggcaatatcattctaatccctgaaagaagcaacagccccgaaaacactagaaatatcttctacaaaggaacctcccccacacgggcttataaggattgagtgatgtccattccatcattagggctactcgcaaaagaccatatgttgattctacctgtgttctgttccagcgaattgggaagtctcaccaagctagattgtctaccatcagcccagaactctgtaacttttcagaactgctatactcaaacttgcagatctcacatcaaggagagggaaaagcacaatgcaagaacctaactaacgtgatgatatgaagagttttcttaagacctgtcgtcaaacttaaaaggttttgcagagggcagtatcaaaagaaagtggttttcttcaaatgtatactattttacttcctgaatgngccaacttttgggggatttttcttnatagngagctggggga

SEQ ID NO: 31 - DNA, 1400 bp, Homo sapiens
  misc_feature (1)..(1400): n is a, c, g, or t
nggaccaccnnnnaaagaaatactagagaggacgcatcaccatcaccatcacggtcgacccacgcgtccgaccttacccaaggatgagctgaaggaactgaagcagaaagtcacgtccaaaattgactatggcaacaaaatccttgagcttgatttgattgtcagagatgaagacggaaatatcttggaccctgataataccagtgtcatcagcttgttccatgcacatgaggaagcaactgataaaatcacagagcgtatcaaagaagaaatgtcaaaagaccagccagattatgcaatgtattcccggatctcctcatcccccacccatagcctctatgtgtttgtgagaaactttgtgtgcagaattggggaagatgctgagctcttcatgtctctctacgaccccaacaagcaaacggtcataagtgagaactacctagtgcgatggggcagccggggcttccctaaggagattgagatgctcaacaatctgaaggtggtcttcacggatcttggaaacaaagacctcaacagggataaaatttacttgatttgtcaaatagtccgggtcggcaagatggatcttaaggatactggtgcaaagaagtgcacgcagggactgaggaggccctttggggtggcagttatggatataacagacatcatcaaggggaaagcagagagtgatgaagaaaagcagcacttcattccttttcacccggttacagctgagaatgacttcctacacagcctgctgggcaaagtcatagcctccaagggggacagtggagggcaaggcctctgggtgaccatgaagatgctggcgggtgacatcattcaaattcgcaaggactatccacacctggtggacaggaccaccgcgatgggccagaaagctgggattccccgagatcatcatgccaggggatgtccggaacgacattctcattactcccctacaaggggctttgaaaagtccaccaagaaccccccgaggaatgtggaagccttcttgggcgggggccccaaggatggcaaaaacctgtccaaagcgaattgccgggaaacggggaaaaccccctgaaggctcccccccctttcggaacaaccacaaaacagccccctggagggaacatacacgggcgtctctcatacgaaaacgtaaatccccactcccacaggttcccacatcatccctctgcatcacataaaacgcacgaacaactactctctctcacccccatacaccatgacacacaccacccaacgacactgtccgtctccacccacccccagacacttctaaactcctcaaccctgcctccaaccatctcacccccacactaccccctgacaaactccttcccaccaccaccacactaccctgctcatcacct

SEQ ID NO: 32 - DNA, 621 bp, Homo sapiens
  misc_feature (1)..(621): n is a, c, g, or t
agaaattactatgagaggatcgcatcaccatcaccatcacggatcctatttaggtgacactatagaatcgtcgacccacgcgtccgccaccacctccccctggatgtttccctctcgcatggcgtggcctgaggaccacgtgttcatttccacacccagcttcaactacacaggccgtgacttccaacgcttctttgcagacctgcactttgaggaaggctggtacatgtggctgcagtcacgtgacctcctggcaggactcccagcacctggtgtggaagtatactgtctttacggcgtgggcctgcccacgccccgcacctacatctacgaccacggcttcccctacacggaccctgtgggtgtgctctatgaggatggtgatgacacggtggcgacccgcagcaccgagctctgtggcctgtggcagggccgccagccacagcctgtgcacctgctgcccctgcacgggatacagcatctcaacatggtcttcagcaacctgaccctggagcacatcaatgccatcctgctgggtgcctaccgccagggtccccctgcatccccgactgccagcccagagcccccgcctcctgaataaagaccttcctttgctaccgt

SEQ ID NO: 33 - DNA, 1407 bp, Homo sapiens
  misc_feature (1)..(1407): n is a, c, g, or t
ncccggactccccctaagaatactagagaggatgcatcaccatcaccatcacggtcgacccacgcgtccgggaaattcgttgtatgaatcttattacaagcaggtcgatccggcatacacagggagggtgggggcgagtgaagctgcgctttttctaaagaagtctggcctctcggacattatccttgggaagatatgggacttggccgatccagaaggtaaagggttcttggacaaacagggtttctatgttgcactgagactggtggcctgtgcacagagtggccatgaagttaccttgagcaatctgaatttgagcatgccaccgcctaaatttcacgacaccagcagccctctgatggtcacaccgccctctgcagaggcccactgggctgtgagggtggaagaaaaggccaaatttgatgggatttttgaaagcctcttgcccatcaatggtttgctctctggagacaaagtcaagccagtcctcatgaactcaaagctgcctcttgatgtcctgggcagggtctgggacctcagtgacattgacaaggatgggcacttggatcgagatgagttcgctgtggccatgcacttggtgtaccgagccctggagaaggagcccgtgccctccgccctgcccccgtccctcatcccaccctccaagagaaagaagactgtgttccctggcgccgtccccgtcctgcctgccagccccccaccaaaagacagcctccgctccacgccgtcccacggcagcgtcagcagcctcaacagcacagggagcctgtcccccaagcacagcctcaagcaaacacagccaacagtgaaactgggtggtgcccgtggcagacaagatgcgatttgatgagatattcctgaagaccgacctggacctgnatggctacgtgagtggccanggaggngaggagatcttcatgcactcgggcctcacccaaaccnttctagcacacatatgggccctggncgatacgagcaaaaccggggaagttaagcaaagaccaattcgcgttagctatgtatttcattcagcagaaggtcagtaaaggcatcgaccctcctcagtcctctcgcccgacatggtcccgccttccgaagagcacgccgggcccggacagtcagctctccggcttccggggatttacgggcggaaaggacttgatgaatcagccaagaatgcccatttccaaaagaaaaatccctggaaaaaaacttccaaaagggagaggatctccccaaaacccgggggggcgaatttcaaatgaccaaaccgaaaaaaaatttttggggccccggtccaaaaaaatgttcaacccctcggaaagacaccaaaagacacccccaatgttttacatccccaaaatcaagaaaacatatttcccttta

SEQ ID NO: 34 - DNA, 1178 bp, Homo sapiens
  misc_feature (1)..(1178): n is a, c, g, or t
attagagaaattactatgagaggatcgcatcaccatcaccatcacggatcctatttaggtgacactatagaatcgtcgacccacgcgtccggatggaataaatctagcacccctgatggtgtgcccacactttgctgccgaaacgaagccagacaacagatttccatcagcaggatgtgggggctcaaggttctgctgctacctgtggtgagctttgctctgtaccctgaggagatactggacacccactgggagctatggaagaagacccacaggaagcaatataacaacaaggtggatgaaatctctcggcgtttaatttgggaaaaaaacctgaagtatatttccatccataaccttgaggcttctcttggtgtccatacatatgaactggctatgaaccacctgggggacatgaccagtgaagaggtggttcagaagatgactggactcaaagtacccctgtctcattcccgcagtaatgacaccctttatatcccagaatgggaaggtagagccccagactctgtcgactatcgaaagaaaggatatgttactcctgtcaaaaatcagggtcagtgtggttcctgttgggcttttagctctgtgggtgccctggagggccaactcaagaagaaaactggcaaactcttaaatctgagtccccagaacctagtggattgtgtgtctganaatgatggctgtggagggggctacatgaccaatgccttccaatatgtgcagaagaaccggggtattgactctgaagatgcctacccatatgtgggacaggaagagagttgtatgtacaacccaaacaggcaaggcaagctaaatgcanagggtacaaaanagatccccgaaggggaaatganaaaagccctgaaanagggcannggcccnaatngggacctgtcctcctgggggccatttgantgcaagccctgancctcctttccantttttacaggcaaaggggngttnttntgantnnaaagctgccaanaacnanaaatctgaacccntgggggtttttngncngngggaantggaanncccaaaggnaaacaancccttggaaaatttaaaancccccnggggaaaaantggggaaaaaaagnaaatttcccntgggtncnaaanaaaaanaaccccgnggnattncccacctggccnnc

SEQ ID NO: 35 - DNA, 1586 bp, Homo sapiens
  misc_feature (1)..(1586): n is a, c, g, or t
tcccccccaccccccataccactctctatgagggatcgcatcccatcaccatcacggtcgacccacgcgtccggcggcgtccaggagcgcgggagaggccggcccgggcggctcccagggacgcgtggtccgcatgaagggcagaggcgggcgcgggccgcgccgcggtcctgctggcggtggggagaaggccctgaagaggctgaagctagcggtggaggagttcgtgcacgcgacttcggaaggcgaggctcccgggggttgcgaggggcgcggcgccccggtgagctttcgcccgggagggagaacaagccgtaaggaactgaggaaggacaaccgtcccctgcgcaaagcacgccgacatgcagacgacgccgctcccccacacaacctacccccacagatcccttcacttcttctctctcacatccctctcaccttccccccccctccccaacccactctccataccctccacactcccatatgccaccctccatctccctaccactccccccccctccccccccctcccaacccactcccccccccatccacctcccacacaccccccatccttctcaacccccccctctacttaccactccccctacctccccccctatacctaccctacccatcacctccccacctccactaccctctccctctaatcacacacttcccattacccttccttacatacaacatccttaaccaccccacactaccttctctcctcactccccccccttctcataccccctcccctcgctctaaccccaccaccatatacctatcctcccacccttcaccattcctccattatctccccacccccaacccccatacacctcctcctaccacccaccttctacctactcacacacacccactccccactccctccctcatacaccactacctcccactctcatcaccccctctaccacttcctcccatctccacttaccctcccctcttacattctcccctccctattacacctactctacccactccacaccacccacaacccctctcacacaccacccaccacccatcacacaccctcaccctctccacccactctcccccacctcaccccccacctcccccacttccccctatactcctaccctctctccctcccctcccacacactactccccccccatctccacactcccactcccccctctcacactctcccacacccaccctccaccatcaccacctctccccgccctcaacctcaccactaacatccatcctttctcaataccactcacttcttctcagcatcttcacacaccactacaccctttcctcctcctccccccacttgaacatacctccactcccaaccaacaccacttcttacacacaccccttcatacccatcacccacctcccttatcctccacctacacacccatccatctctaactcacaccatcctttactcctccctcattaccacacccaatccacgtcccctcactactctcaccttctcataccccacataactcctcttctctctcagcctttcaccactcccccacacttaccttcatcatata

SEQ ID NO: 36 - DNA, 1208 bp, Homo sapiens
  misc_feature (1)..(1208): n is a, c, g, or t
tagagaaaattactatgagaggatcgcatcaccatcaccatcacggatcctatttaggtgacactatagaatcgtcgacccacgcgtccggctctttcctcagacccccagccttttgtgcgccgcgcggtggggcggtgcccagcttgggggaaggagagcggcgcttatcgaagtgtggtcgacctccatccgcccaccgagcacttgggacccgctgcacatatccagagcagggaaagctgtggctttctcgggggagcgagtgtctaggggaagggtgtggcaggcccacgggatgccatgccctagaacaacggcctgagcgcttgtggaattaaaatgggagatgtggggccgagttctgggaggtgatcagtgatgaacatggcatcgaccccaccggcacctaccacggggacagcgacctgcagctggaccgcatctctgtgtactacaatgaagccacaggtggcaaatatgttcctcgtgccatcctggtggatctagaacctgggaccatggactctgttcgctcaggtccttttggccagatctttagaccagacaactttgtatttggtcagtctggggcaggtaacaactgggccaaaggccactacacagagggcgccgagctggttgattctgtcctggatgtggtacggaaggaggcagagagctgtgactgcctgcagggcttccagctgacccactcactgggcgggggcacaggctctggaatgggcactctccttatcagcaagatccgagaagaataccctgatcgcatcatgaataccttcagtgtggtgccttcacccaaagtgtctgacaccgtggtcgagccctacaatgccacccctctccgtccatcagttggtaaagaatactgatgaaaacctattgcattgacaacgaggccctctatgaaatctgcttccgcactctgaancctgacnacaccaacctacggggatcttaaaccncctngtctcanccnccatgantggngtcnccacctgcctcgtttncctggcaantcaatgctgacctccncaagttggnaatcanatggtcccnttccccgtncccttttttttancctggntttncccctcccccanccnngnaancnacaatnncaantttccangncngaaatccccnaaaggtntnnattccaaaaaaataaggntncttgaacc

SEQ ID NO: 37 - DNA, 1173 bp, Homo sapiens
  misc_feature (1)..(1173): n is a, c, g, or t
gagaaattactatgagaggatcgcatcaccatcaccatcacggatcctatttaggtgacactatagaatcgtcgacccacgcgtccgctgcttcatcatcatcctcctcagctggtggggtcagtggaagttctgtcactggatctggtttcagtgtctcagaccttgccccaccacggaaagcccttttcacctaccccaaaggagctggagagatgttagaagatggctctgagagattcctctgcgaatctgtttttagctatcaagtggcatccacgcttaaacaggtgaaacatgatcagcaagttgctcggatggaaaaactagctggtttggtagaagagctggaggctgacgagtggcggtttaagcccatcgagcagctgctgggattcaccccctcttcaggttgatactgcctggatggtcacctctggtgcgcagcaagtgcaaagccagtgggggactttctcacagcttacatagccatccagagatccacagctacgtcactgaattgttaatgcacatttgtacttggtttctctgtatctattcacaggcaacaaatacttatatgtgtgatctttcagggaatgttttgtttatttgtttttaaaagtattgggaatcagattaagacaatcagtttcagagaaccaggaggtttggggttaagagatactcaaaaattttcacaagccaagtagggcatatatcagatttggccaactgaatggcgtctgtcctgtcatccatatggtgcctggaaatatttaccnagtcaaggtcaaggtcagcatctgtggntnaaaaatatagcattctgacctaaaaaagttattttgcagatgaatgtgttttcaactcaggacctatccaaatgagnaatttttaaaaattcnttttttttttcccnatttttanacatcaattctnaaaaattctgaacttttttctaaacctcntaaaaaacatgcccaaaatgctggncaaaaaaaaaantgctttttggaaaanggncanccnctttgnnaaaaannaaaccagttaanncaaaatncctttttnaaacncanaaaatcccgganttcttcccnattgggggaacncaaccantttctgttannaaaaaaatccntttgaaaaaanccnccaaaaannnnnnnn

SEQ ID NO: 38 - DNA, 1179 bp, Homo sapiens
  misc_feature (1)..(1179): n is a, c, g, or t
tagagaaattactatgagaggatcgcatcaccatcaccatcacggatcctatttaggtgacactatagaatcgtcgacccacgcgtccgagtgtatgtgtaagcacaacacagcaggcagccactgccagcactgtgccccgttatacaatgaccggccatgggaggcagctgatggcaaaacgggggctcccaacgagtgcagaacctgcaagtgtaatgggcatgctgatacctgtcacttcgacgttaatgtgtgggaggcatcagggaatcgtagtggtggtgtctgtgatgactgtcagcacaacacagaaggacagtattgccagaggtgcaagccaggcttctatcgtgacctgcggagacccttctcagctccagatgcttgcaaaccgtgttcctgccatccagtaggatcagctgtccttcctgccaactcagtgaccttctgcgaccccagcaatggtgactgcccttgcaagcctggggtggcagggcgacgttgtgacaggtgcatggtgggatactggggcttcggagactatggctgtcgaccatgtgactgtgcggggagctgtgaccctatcaccggagactgcatcagcagccacacagacatagactggtatcatgaagttcctgacttccgtcccgtgcacaataagagcgaaccagcctgggagtgggaggatgcgcaggggttttctgcacttctacactcaggtaaatgcgaatgtaaggaacagacattaggaaatgccaaggcattctgtggaatgaaatattcatatgtgctaaaaataaagattttatcagctcatgataaaggtactcatgttgaggtcaatgtgaanattaaaaaggtcttaaaatctaccaaactgaaaattttccgangaaaagcgaacattatatccanaatcatggacggacaaaggatgcccttgttccaatcctcaatcctgggtttggaaaaaccttgtaccagnacatgaaggaatttaaaaacaggcnaaactaattngtgaaaaatnaaaaagcttttntccnnncactggaaacccttttcctttggnaaaaaaaanttcntgggaaaatttttaaaaaanaaaagggcaagttaccctttaaaaatgggatancccnntaatgggcnctttnttcttttttncnaaaa

SEQ ID NO: 39 - DNA, 453 bp, Homo sapiens
  misc_feature (1)..(453): n is a, c, g, or t
ttnaaaannnntntaantccccaattnttaaagcaggagaaattaactatgagaggatcgcatcaccatcaccatcacggatcctatttaggtgacactatagaatcgtcgacccacgcgtccgcgacctacgcacacgagaacatgcctctcgcaaaggatctccttcatccctctccagaagaggagaagaggaaacacaagaagaaacgcctggtgcagagccccaattcctacttcatggatgtgaaatgcccaggatgctataaaatcaccacggtctttagccatgcacaaacggtagttttgtgtgttggctgctccactgtcctctgccagcctacaggaggaaaagcaaggcttacagaaggatgttccttcaggaggaagcagcactaaaagcactctgagtcaagatgagtgggaaaccatctcaataaacacattttggat

SEQ ID NO: 40 - DNA, 800 bp, Homo sapiens
  misc_feature (1)..(800): n is a, c, g, or t
cttaagaggagaattaactatgagaggatcgcatcaccatcaccatcacggatcctatttaggtgacactatagaatcgtcgacccacgcgtccgacgccggtcgcttccacagcaccaagaagggcaatttccacgagatcttcaatctgacagaaaacgagcgtccgctggcggtgtgcgagaatggctggcgctgctgcctcatcaacagggaccggaagatgcccacggactacatcaggaacggggtgctctacgtcacggagaattacttgtgcttcgaaagctccaaatctgggtcctcaaagaggaacaaagtcatcaagctagtggacatcacggacatccagaagtacaaggtcctgtctgtcctcccaggctcaggcatggggattgccgtgtcgacgccatccacccagaaaccgctcgtgtttggtgccatggtgcacagggatgaggccttcgagaccattctcagccagtacatcaagatcacctcagcggcagcgtctggcggggacagctagtattgacttgcccaggacgttgctggaattttctttttctttttctttttcttttttttttttttacgatttggtagtggaaacaattggacatcctcatgagcttttgcaataattctccctggacctgtgggttnctattgggttgacctctgcgttttatcgaccaagaaggggccaggctccncanggggnaaaggggggggcccccntctcccacagggcaccnncaggngcctctgangncnccccccnnanaaaattnnnnnnn

SEQ ID NO: 41 - DNA, 993 bp, Homo sapiens
  misc_feature (1)..(993): n is a, c, g, or t
agaaattactatgagaggatcgcatcaccatcaccatcacggatcctatttaggtgacactatagaatcgtcgacccacgcgtccgcccacttccgcccttttggctctctgaccagcaccatggcggttggcaagaacaagcgccttacgaaaggcggcaaaaagggagccaagaagaaagtggttgatccattttctaagaaagattggtatgatgtgaaagcacctgctatgttcaatataagaaatattggaaagacgctcgtcaccaggacccaaggaaccaaaattgcatctgatggtctcaagggtcgtgtgtttgaagtgagtcttgctgatttgcagaatgatgaagttgcatttagaaaattcaagctgattactgaagatgttcagggtaaaaactgcctgactaacttccatggcatggatcttacccgtgacaaaatgtgttccatggtcaaaaaatggcagacaatgattgaagctcacgttgatgtcaagactaccgatggttacttgcttcgtctgttctgtgttggttttactaaaaaacgcaacaatcagatacggaagacctcttatgctcagcaccaacaggtccgccaaatccggaagaagatgatggaaatcatgacccgagaggtgcagacaaatgacttgaaagaagtggtcaataaattgattccagacagcattggaaaagacatagaaaaggcttgccaatctatttatcctctccatgatgtcttcgttagaaaagtaaaaatgctgaagaagcccaagtttgaattgggaaagctcatggagcttcatggtgaaggcagtagttctggaaaagccactgggggacgagacaggtgctaaaagttgaaccgagctgatggatatgaaccaccagtccaaaaatctgtttaaagttcanacttcaanagtggcaaataaaaagtgctatttgtgaaaaaanaannnnnannnnnnnnnnnnnnnna

SEQ ID NO: 42 - DNA, 1061 bp, Homo sapiens
  misc_feature (1)..(1061): n is a, c, g, or t
ttagagaaattactatgagaggatcgcatcaccatcaccatcacggatcctatttaggtgacactatagaatcgtcgacccacgcgtccgcgggactcttggcgggtgaaggtgtgtgtcagcttttgcgtcactcgagccctgggcgctgcttgctaaagagccgagcacgcgggtctgtcatcatgtcgcgttacgggcggtacggaggagaaaccaaggtgtatgttggtaacctgggaactggcgctggcaaaggagagttagaaagggctttcagttattatggtcctttaagaactgtatggattgcgagaaatcctccaggatttgcctttgtggaattcgaagatcctagagatgcagaagatgcagtacgaggactggatggaaaggtgatttgtggctcccgagtgagggttgaactatcgacaggcatgcctcggagatcacgttttgatagaccacctgcccgacgtccctttgatccaaatgatagatgctatgagtgtggcgaaaagggacattatgcttatgattgtcatcgttacagccggcgaagaagaagcaggtatttattttaataaaggaatggttggtattctagttaatcaagtaattcttttattagcaaggcagaaactagtgtttttctataaacttgaatgttaattgtacaggtgtattttacaatttttgtttaattaaaaaaatgttactatattaataatcaacctggtcaaaacctttcaggtttcttcgtttgagtcagtcgccttgattcanaatgtcacgagccttatgatatcatgctgaggcgcccttgcaaatccgacaattaanatcctcctananccttgaggngatcagcataanangccagatccccctcnagncatctacacctancttcncccttattcttttaaaggggcaaaaaattttgaaaacgggggatccccnnnaacaanaaaaatttggcnttacaanttggggncccccccnccngntttnaaaaaaaggaaacccccaaattggnccccctttcccccnctaaaaaa

SEQ ID NO: 43 - DNA, 868 bp, Homo sapiens
  misc_feature (1)..(868): n is a, c, g, or t
ttnttaagaggagaaatnactntgagaggatcgatacntncnatncggatcctatttaggtgacactatagaatcgtcgacccacgcgtccgcggacgcgtgggaaataacactatatccagacaagcatgggtgtgtccgggacctgttagaagaatgtaaaaaggccgtggagcttggggagaaagcatcagggaaacttaggctgctagaaattgtaagctacaaaatcattggtgttcatcaagaagatgaactattagaatgtttatctcctgcaacgagccggacgtttcgaatagaggaaatccctttggaccaggtggacatagacaaagagaatgagatgcttgtcacagtggcgcatttccacaaagaggtcttcggaacgttcggaatcccgtttttgctgaggatacaccagggcgagcattttcgagaagtgatgaagcgaatccagagcctgctggacatccaggagaaggagtttgagaagtttaaatttgcaattgtaatgatgggcccgacaccagtacataaatgaagacgagtatgaagtaaatttgaaagactttgagccacagcccggtaatatgtctcatcctcggccttggctagggctcgaccacttcaacaaagccccaaagaggagtcgctacacttacccttggaaaaggccattaaaatncataactgatttncaagctggtgtgttcaaggccaaggacggtgtgtggttgcccccttaaagcctaaaactttggngcacgggccctntaaccgaatnttancaagagattccctggtggggtaattttttttattggggtggtnaattggctttttgatntttggccggcctttttgg

SEQ ID NO: 44 - DNA, 1160 bp, Homo sapiens
  misc_feature (1)..(1160): n is a, c, g, or t
naatagagaaattactatgagaggatcgcatcaccatcaccatcacggatcctatttaggtgacactatagaatcgtcgacccacgcgtccgcttcgccttcccttctctccccctccccgctccccccccgaccgcggagcagcaccatgtcggcgccggcggccaaagtcagtaaaaaggagctcaactccaaccacgacggggccgacgagacctcagaaaaagaacagcaagaagcgattgaacacattgatgaagtacaaaatgaaatagacagacttaatgaacaagccagtgaggagattttgaaagtagaacagaaatataacaaactccgccaaccattttttcagaagaggtcagaattgatcgccaaaatcccaaatttttgggtaacaacatttgtcaaccatccacaagtgtctgcactgcttggggaggaagatgaagaggcactgcattatttgaccagagttgaagtgacagaatttgaagatattaaatcaggttacagaatagatttttattttgatgaaaatccttactttgaaaataaagttctctccaaagaatttcatctgaatgagagtggtgatccatcttcgaagtccaccgaaatcaaatggaaatctggaaaggatttgacgaaacgttcgagtcaaacgcagaataaagccagcaggaagaggcagcatgaggaaccagagagcttctttacctggtttactgaccattctgatgcaggtgctgatgagttaggagaggtcatcaaagatgatatttggccaaacccattacagtactacttggttcccgatatggatgatgaagaaggagaaggagaagaagatgatgatgatgatgaagaggaggaaggattanaagatattgacgaanaaggggatgaggatgaaggtgaagaagatganagnaatgatgaaggggaagaaagnaaaggaggatgaaggaaaaaatgactaantanaacnctgatggatnccanccttcctttttttaatttttnccagtccctggggancagttgcagnctttttttttttttttttttttttccccctggggcccancccccngntcttgaggnncntttcccnacccngggtcccnattttttgggggaaaaccntngnnnaaaan

SEQ ID NO: 45 - DNA, 854 bp, Homo sapiens
  misc_feature (1)..(854): n is a, c, g, or t
agaggatcgcatcaccatcaccatcacggatcctatttaggtgacactatagaatcgtcgacccacgcgtccgggtcggtagtagcgatggcgggtctgactgacttgcagcggctacaggcccgagtggaagagctggagcgctgggtgtacgggccgggcggggcgcgcggctcacggaaggtggctgacggcctggtcaaggtgcaggtggctttggggaacatttccagcaagagggagagggtgaagattctctacaaaaagattgaagatctgatcaagtacctggatcctgagtacatcgaccgcattgccatacctgatgcctctaagctgcaattcatcctagcagaggagcagtttatcctttcccaggttgcactcctggagcaggtgaatgccttggtgcccatgctggacagtgctcacatcaaagccgttcctgagcatgctgcccgcctgcagcgcttggcccagatccacattcagcagcaggaccagtgtgtggaaatcactgaggagtccaaggctctcctggaggaatacaacaagactacaatgcttctctccaagcaattcgtgcagtgggatgagctactttgccagctagaggccgccacgcaagtgaagccagcagaggagtgatagctgctccccatcccaaagtgggcctgggcagtcaggctccagggccctatgccaacctgcctttgttacaaggcagaggaagctttgtatttattggcttcaaggcccacctctctgtactctgggctctaaagttggaggtcaggttacctgaggtttgcaatttgcaacacccaccctccccccaatcagtgttcttattt

SEQ ID NO: 46 - DNA, 1088 bp, Homo sapiens
  misc_feature (1)..(1088): n is a, c, g, or t
atngaggaaattacnatggagaggatcgcatcaccatcaccatcacggatcctatttaggtgacactatagaatcgtcgacccacgcgtccggtgcgattgtggaagctgctcggcttgagaaagtccacagtcttttccggcgacagttggcgattccactctatgatatggaggccacatttgcagagtatgaagaatggtcagaagacccaataccagagtcagtaattcagaactataacaaagcactacagcagctggagaaatataaaccctatgaagaagcactgttgcaggcagaggcaccaaggctggcagaatatcaagcatatatcgattttgagatgaaaattggcgatcctgctcgcattcagttgatctttgagcgcgccctggtcgagaactgccttgtcccagacttatggatccgttacataaccttcgagaaagctttgaatgccggcttcatccaggccactgattatgtggagatttggcaggcataccttgattacctgaggagaagggttgatttcaaacaagactccagtaaagagctggaggagttgagggccgcctttactcgtgccttggagtatctgaagcaggaggtggaagagcgtttcaatgagagtggtgatccaagctgcgtgattatgcagaactgggctaggattgaggctcgactgtgcaataacatgcagaaagctcgggaactctgggatagcatcatgaccagaggaaatgccaagtacgccaacatgtggctagagtattacaacctggaaaagagctcatggtgacacccagcactgccggaaggctctgcaccgggccgtccagtgcaccagtgactacccanagcacgtctgcgaagtgttactcnccatggagaggacagaaggttcttttaaaanaattgggaatatagctgttccaaaaaactgaaaccccgnattaacctcgngtcaatgaacaaaanaatgaaaggctgcanaaaaaagaaaccacccccnttgngcncnaagaaaaanaaaaggctgaaccaacggaaaaaaancctcgggnctgaaaaaaaaaagcntt

SEQ ID NO: 47 - DNA, 863 bp, Homo sapiens
  misc_feature (1)..(863): n is a, c, g, or t
tnangaggagaattaactatgagaggatcgcatcaccatcaccatcacggatcctatttaggtgacactatagaatcgtcgacccacgcgtccgcgaagatggccggttggcagagctacgtggataacctgatgtgcgatggctgctgccaggaggccgccattgtcggctactgcgacgccaaatacgtctgggcagccacggccgggggcgtctttcagagcattacgccaatagaaatagatatgattgtaggaaaagaccgggaaggtttctttaccaacggtttgactcttggcgcgaagaaatgctcagtgatcagagatagtctatacgtcgatggtgactgcacaatggacatccggacaaagagtcaaggtggggagccaacatacaatgtggctgtcggcagagctggtagagtcttggtctttgtaatgggaaaagaaggggtccatggaggcggattgaataagaaggcatactcaatggcaaaatacttgagagactctgggttctagctgctaggcagactgttaagtattaggggaaaattgctcttaaactttcctagctataagcttaagtcttaattctggaaattttattagcaatgcagggtgatggggtatgaancctgtgtctcctttgtatccctctggtgggggggaaaaggtgnctttctttctgccctccccccccaaaataattctggtcccnttttggttttggttcccttgggnncccccagcaattgggttatagccatgggnaaaangaaagnggtccacggnaggcccccnttaancangaaaagcatntgaactcccttttantacctngnggaggnnnggttgngana

SEQ ID NO: 48 - DNA, 1047 bp, Homo sapiens
  misc_feature (1)..(1047): n is a, c, g, or t
aaattagagaaaattactatgagaggatcgcatcaccatcaccatcacggatcctatttaggtgacactatagaatcgtcgacccacgcgtccgggggacgctctcagctctcggcgcacggcccagcttccttcaaaatgtctactgttcacgaaatcctgtgcaagctcagcttggagggtgatcactctacacccccaagtgcatatgggtctgtcaaagcctatactaactttgatgctgagcgggatgctttgaacattgaaacagccatcaagaccaaaggtgtggatgaggtcaccattgtcaacattttgaccaaccgcagcaatgcacagagacaggatattgccttcgcctaccagagaaggaccaaaaaggaacttgcatcagcactgaagtcagccttatctggccacctggagacggtgattttgggcctattgaagacacctgctcagtatgacgcttctgagctaaaagcttccatgaaggggctgggaaccgacgaggactctctcattgagatcatctgctccagaaccaaccaggagctgcaggaaattaacagagtctacaaggaaatgtacaagactgatctggagaaggacattatttcggacacatctggtgacttccgcaagctgatggttgccctggcaaagggtagaagagcagaggatggctctgtcattgattatgaactgattgaccaagatgctcgggatctctatgacgctggagtgaagaggaaaggaactgatgttccccaagtggatcagcatcatgaccgancggagcgtgccccacctccagaaagtatttngataggtacaaaaanttaacagcccctttatgacattgtttggaaaagcntcaggaaagangtttaaaggganacntggaaaaatggcntttcctgaaccctgggttcantngcattcaaaaacaaagcccccntggaatttttgctgantcggntggnaaganctcccntgaaangncnangggggaacncnnaaaaaaaagggnctgantcanaaant

SEQ ID NO: 49 - DNA, 883 bp, Homo sapiens
  misc_feature (1)..(883): n is a, c, g, or t
tgagaggatcgcatcaccatcaccatcacggatcctatttaggtgacactatagaatcgtcgacccacgcgtccgcccacgcgtccgcccacgcgtccggcagtttgttaaggaatgaggttacagattcaggaattgtagggcctcaacctatagactttgtcccaaatgctctccgacatgcagtagatgggagacaagaggagattcctgtggtcatcgctgcatctgaagacaggcttgggggggccattgcagctataaacagcattcagcacaacactcgctccaatgtgattttctacattgttactctcaacaatacagcagaccatctccggtcctggctcaacagtgattccctgaaaagcatcagatacaaaattgtcaattttgaccctaaacttttggaaggaaaagtaaaggaggatcctgaccagggggaatccatgaaacctttaacctttgcaaggttctacttgccaattctggttcccagcgcaaagaaggccatatacatggatgatgatgtaattgtgcaaggtgatattcttgccctttacaatacagcactgaagccaggacatgcagctgcattttcagaagattgtgattcagcctctactaaagttgtcatccgtggagcaggaaaccagtacaattacattggctatcttgactataaaaaggaaagaattcgtaagctttccatgaaagccagcacttgctcatttaatcctggagtttttgttgcaaacctgacggaatggaaacgacagaatataactaaccaactggaaaaatggatgaaactcaatgtagaagagggactgtatagcagaaccctggctggtagcatcacaacacctcctctgcttatcgt

SEQ ID NO: 50 - DNA, 1429 bp, Homo sapiens
  misc_feature (1)..(1429): n is a, c, g, or t
ncccacccccnccncccgccaatactagagaggatcgcatcccatcaccatcacggtcgacccacgcgtccggtctggaagacctcagaagacctcctgtcctatgaggccctccccatggctttagagacgatctgccgaccctctgggagaaaatccagcaagatgcaagccttcagaatctgggatgttaaccagaagaccttctatctgaggaacaaccaactagttgctggatacttgcaaggaccaaatgtcaatttagaagaaaagatagatgtggtacccattgagcctcatgctctgttcttgggaatccatggagggaagatgtgcctgtcctgtgtcaagtctggtgatgagaccagactccagctggaggcagttaacatcactgacctgagcgagaacagaaagcaggacaagcgcttcgccttcatccgctcagacagcggccccaccaccagttttgagtctgccgcctgccccggttggttcctctgcacagcgatggaagctgaccagcccgtcagcctcaccaatatgcctgacgaaggcgtcatggtcaccaaattctacttccaggaggacgagtagtactgcccaggcctgcctgttcccattcttgcatggcaaagactgccgggaatgccagtccccctgccccaaggctcccggttatgggggcactgaggaccacccatgaggggtgaacccccaaaaggggtcccaaaaaactgggccaaggaatctgcccccctttcaattgaccagcctccatggtggcccccaaaaggccttctaaatgggggaaacaaaagaaaagaagcccctgccaaaaaacccttcccggggccccctcggattttgggaaaaaaacccgaaaccccgggcaaaaagggttcccctttgtgacagggctctttcctccccctttccccctttccagggcccggagacccaaacgcccctttgttagccccccccccaaggggggccccccaccctgtttttaaaaaaaaaaaaaccctccctccctgcgggggcgtttttcctgtgctcgccacaacaacaaacataatccctcgcctctctttctcactcccccccccggaacaggcctcccccctctcaccatacactccctcccgccgcacccaacgaactcccaaaacatctctccccccctatacgcaggtgacagacacctcccaccaaccccctgcccctaccatttcttcacagcccccacacctcacccaccactaccatcactcatctcacactctacactacccacacttctcacatcctccctcccccatgccacccacacactccccaacagcatacgcgcatcactcgtccacgcctatatcatcctcacttccacacagacatcanactctaccgcatcctcccttacgtc

SEQ ID NO: 51 - DNA, 1162 bp, Homo sapiens
  misc_feature (1)..(1162): n is a, c, g, or t
tagagaaattactatgagaggatcgcatcaccatcaccatcacggatcctatttaggtgacactatagaatcgtcgacccacgcgtccggggagccggatcgccgacctgagcgggaggcggcggtggcggccatggcggcagatggagagcgttccccgctgctgtctgagcccatcgacggtggcgcgggcggcaacggtttagtggggcccggcgggagtggggctgggcccgggggaggcctgaccccctccgcaccaccgtacggagccgcatttcccccgtttcccgaggggcatccagccgtgttgcctggggaggacccacccccctattcacccttaactagcccggacagtgggagtgcccctatgatcacctgccgagtctgccaatctctcatcaacgtggaaggcaagatgcatcagcatgtagtcaaatgtggtgtctgcaatgaagccaccccaatcaagaatgcacccccagggaaaaaatatgttcgatgcccctgtaactgtctccttatctgcaaagtgacatcccaacggattgcatgccctcggccctactgcaaaagaatcatcaacctggggcctgtgcatcccggacctctgagtccagaaccccaacccatgggtgtcagggttatctgtggacattgcaagaatacttttctgtggacagagttcacagaccgcactttggcacgttgtcctcactgcaggaaagtgtcatctattgggcgcanatacccacgtaagagatgtatctgctgcttcttgcttggcttgcttttggcagtcactgccactggccttgcctttggcacatggaagcatgcacggcgatatggangcatctatgcagcctgggcatttgtcatcctgttggctgtgctgtgtttgggcccgggctctttattgggcctgnatgaangtcanccnccctgtccaaaaattctcttgaacctgataaccacaaantgtgcctggcccctnccntggtgggnaagtgannctacaaaggaanntggggtanttaangnttccgggnntntaaaaagaaacnaananctnccttctttttcctgggaaaagtagnaagaaaccagccctncnnttantttngaaggnnaanaaaaacctgntnaacatntnttt

SEQ ID NO: 52 - DNA, 816 bp, Homo sapiens
  misc_feature (1)..(816): n is a, c, g, or t
agaaattaactatgagaggatcgcatcaccatcaccatcacggatcctatttaggtgacactatagaatcgtcgacccacgcgtccgcccacgcgtccgnccgcttctggtgcccagagtgcggcaaaggtttcaggcgccgggcgcacctgcggcagcacggggtgacccactcgggagcgcgccccttccagtgcgtgcgctgccagcgggagttcaagcgcctggccgacctggcgcgccacgcacaggtgcacgcggggggcccagccccgcacccgtgcccccgctgcccgcgccgcttctcgcgcgcctacagcctcctgcgccaccagcgctgccaccgcgcanagctggagagggccgccgcgctgcaggcactgcaggcccaggccccgacgtcgccgccaccgcccccgccgcccctgaaggccgannaggaggaagaagggctcccgctgcccctcgcaaacattaaggaanagccgccctctccggggaccccaccccagtccccgncggctccccctgtcttcctcagcgcctnctgtttnnacagncaagaccactcanccttcgagatggatgaggaagangtanacagtaaagctcanctgntcgggttggggggcctggcntcntgaanttcnccgccctgntctcngccgntccgacntganctccccggtttgnanaatgtangagggaatttgaangagccacctcctctnnnntacncaacctttccccttnatacccttganaatnaatgaatggggggtccttggaatagcctnttcctcnncaattnngntc

SEQ ID NO: 53 - DNA, 1219 bp, Homo sapiens
  misc_feature (1)..(1219): n is a, c, g, or t
nnnttagagaaattactatgagaggatcgcatcaccatcaccatcacggatcctatttaggtgacactatagaatcgtcgacccacgcgtccggaggaaagctctctccttttctgccacccgagatcttccagaagcttcagggggcagagtcacaaagctgtaagaaagagctgacgccactggaggaggcctccctgcagaatcagaagctgaaggctgcgtatgaggcccgaatggcgcggctagaccccagccaggccatgcagaagacatccctgaccctctctctacagcggcagatgatggagaacctagtgattgccaaagcccgggaggagacactccagagaaagatggaggagcgccggctgcggctccaggaggccgccaacaggaggttttgcagccaagtcgccctgaccccggaggaacgggagcagcgggccctttacgccgccatcctggagtacgaacaggaccatgactggccgaagcactggaaggccaagctcaagaggaatccgggggacctgtcactcgtgaccagcctggtctcacacctgctcagcctccccgaccacccgatcgcgcagctcctgaggcggctgcagtgctccgtgtacagcgccctgtatcccgccgtgagcagagcagccgcgccagccccaggctgctgccccccgacccccaaccccggaagccgacggctgcggccctcgcagagcctccattgcatgctgtccccgcccgagcccagcgcagccccgcggccccaggacagtccccccacgcccccactccaacccggccccgtggggtctccctcacccctgggggacaccgcatctggattgccanacaaggacagctcgttcgaggacntggancaattcntggggacgtctgaacggcaggncngggccgtggggtacagccggaaccccactgcancacctgaaaacgnggtggaagaaatccnaatgcntnanaaanaggttgctctcgctnaccttttggcttncaagggnctaaaannagtttncttcaaagnacngctgcntggcctngcnttnagaaaccnttttttnccccgtngggcccttngtnttggccntntaaggnncgtgnnncnacccnggaaggnttcctnaananaacttgactttnaaggaagnccccccnccctttggttcccncaagttcnccccnaaacttn

SEQ ID NO: 54 - DNA, 1165 bp, Homo sapiens
  misc_feature (1)..(1165): n is a, c, g, or t
tagagaaattactatgagaggatcgcatcaccatcaccatcacggatcctatttaggtgacactatagaatcgtcgacccacgcgtccgcagaggagatccgcgagaaactgcagcaggtgatgtccaggaggaaagagatgaatgagaagtgggaagcccgctgggagcggctccgcatgttgctggaggtgtgccagttctcgagggatgcctctgtggctgaggcgtggctgattgcccaggagccctacctggccagcggggactttggacacacagtggacagtgtggagaagctcatcaagaggcatgaggcttttgagaagtccacggccagctgggcagagcgctttgctgccctggagaagcccaccacgcttgagctgaaagaacgccagattgcagagagacccgcagaggagactgggcctcaagaggaggaaggcgagacagcaggggaggctccagtttcccaccatgcggccaccgagagaacgtccccgggggaagaagagggaacgtggcctcagaacctgcagcagccaccaccgccgggtcagcacaaggatgggcagaaatccactggggatgagaggcccaccacggagcccctctttaaggtcctagatacgcctctgagcgagggtgatgagcccgcaacgctgccggccccgcgggaccatgggcagagtgtgcagatggaaggctacctgggccgcaagcatgacctggaggggcccaacaagaaggcttccaacaggtcctggaacaacctgtactgtgtgctcaggaacagtgagctaaccttctacaaggatgccaagaacctggccctggggatgccctaccatggggaggaacccctggccctgaaacatgccatctgtganattgctgccaactacaaaaanaaaaancncgtctttaanctgaagctgantatggcagcgagtggctcttccatggcaagaatgaagaagaaatgctntcctngcttcnagggcgtgancncccccatcaacgantcccaaaacatcccccntcaaggncaaaacctgcccctgnctttccttnccggncccnaacccnncctnggnaaaaaaanaaggaaaaaaaatnccccttttccccaaaaaaatacnnggnggggttggngggncccn

SEQ ID NO: 55 - DNA, 1028 bp, Homo sapiens
  misc_feature (1)..(1028): n is a, c, g, or t
tagagaaattactatgagaggatcgcatcaccatcaccatcacggatcctatttaggtgacactatagaatcgtcgacccacgcgtccggctacatcattctgtacaactaccgccatggtggccgccaggggcagataatctataactggcagggtgcccagtctacccaggatgaggtcgctgcatctgccatcctgactgctcagctggatgaggagctgggaggtacccctgtccagagccgtgtggtccaaggcaaggagcccgcccacctcatgagcctgtttggtgggaagcccatgatcatctacaagggcggcacctcccgcgagggcgggcagacagcccctgccagcacccgcctcttccaggtccgcgccaacagcgctggagccacccgggctgttgaggtattgcctaaggctggtgcactgaactccaacgatgcctttgttctgaaaaccccctcagccgcctacctgtgggtgggtacaggagccagcgaggcagagaagacgggggcccaggagctgctcagggtgctgcgggcccaacctgtgcaggtggcagaaggcagcgagccagatggcttctgggaggccctgggcggnaaggctgcctaccgcacatccccacggttgaaggacaagaagatggatgcccatcctcctcgcctctttgcctgctccaacaagattggacgttttgtgatcgaagaggttcctggtgagctcatgcaggaanacctggcaacggatgacgtcatgcttctggacacctgggaccaggtctttgtttgggttggaaaggattctcaagaagaanaaaagacngaagccttgacttctgctaagnggtacatngaaaanggacccanccaatcgggaatcgggggaacncccatcncccgggggngaaaaaaagggtttttganccntcccntccnttttggggggnttggntnccnttgggntgggaaaanaanaatnanngggnnntggggganccccctttgganaagggncc

SEQ ID NO: 56 - DNA, 1253 bp, Homo sapiens
  misc_feature (1)..(1253): n is a, c, g, or t
aatagagagattactatgagaggatcgcatcaccatcaccatcacggatcctatttaggtgacactatagaatcgtcgacccacgcgtccgcggacgcgtgggctcgaaaagataaagaccaaaggaagcaacaggcaatgtggcgagtgccctctgatttaaagatgctaaaaagactcaaaactcaaatggccgaagttcgatgtatgaaaactgatgtaaagaatacactttcagaaataaaaagcagcagtgctgcttctggagacatgcagacaagccttttttctgctgaccaggcagctctggctgcatgtggaactgaaaactctggcagattgcaggatttgggaatggaactcctggcaaagtcatcagttgccaattgttacatacgaaactccacaaataagaagagtaattcgcccaagccagctcgatccagtgtagcaggtagtctatcacttcgaagagcagtggaccctggagaaaatagtcgttcaaagggagactgtcagactctgtctgaaggctccccaggaagctctcagtctgggagcaggcacagttctccccgagccttgatacatggcagtatcggtgatattctgccaaaaactgaagaccggcagtgtaaagctttggattcagatgctgttgtggttgcagttttcagtggcttgcctgcggttgagaaaaggaggaaaatggtcaccttgggggctaatgctaaaggaggtcatctggaaggactgcagatgactgatttggaaaataattctgaaactggagagttacagcctgtactacctgaaggagcttcagctgcccctgaagaaggaatgagtagcgacagtgacattgaatgtgacactgagaatgaggagcaggaagagcataccagtgtgggcgggtttcccgactccttcatggtcatgacacanccccggatgaanatacncattccagttttcctgatggngaacaaataggccctgaaaatctcncctncatacngantgaaaaaannggaaggtantngccaaatcaanaaactgacttgncaagctaccttgaccctgaatttgctgaantggggcccaaattgtctccgccaaaaacnaaattnggcctttttnttcntntcccnccngaannanaatttgaaacggtnggagggggcncttttttctnaaaccccnntnttcctgggaaaacnnttgggaaantttttttatgggangaaaanann

SEQ ID NO: 57 - DNA, 1325 bp, Homo sapiens
  misc_feature (1)..(1325): n is a, c, g, or t
attagagagaattactatgagaggatcgcatcaccatcaccatcacggatcctatttaggtgacactatagaatcgtcgacccacgcgtccgtggagtccgtcagttgctccgctgctgctgtcaggaccggagacatggagtcccagcgggacctgagcctggtgcctgagcggcttcagagacgcgaacaagaacggcagctggaagttgaaaggcggaaacaaaagcggcagaaccaggaggtagagaaggagaacagccactttttcgtcgccacctttgctcgggagcgagcggccgtggaagagcttctggagcgcgcggagtcggtcgagcggctggaggaggcggcctctcggctccaggggctgcagaaactaatcaacgactcagtttttttcctagccgcttacgacctgcggcagggacaagaggcgctggcgcggctgcaggcggccttggccgagcggcgccgggggctgcagcccaagaagcgtttcgctttcaagacccggggaaaggatgctgcttcgtctaccaaagtagacgcggctcctggcatccccccggcagttgaaagcatacaggactccccgctgcccaagaaggcggaaggagacctcggccccagctgggtctgcggtttctccaacctggagtcccaagtcttggagaagagagccagcgagttgcaccagcgcgacgttcttttgaccgaactgagcaactgcacggtcagactgtatggaaatcccaacaccctgcggctaaccaaggcccacagctgcaagctgctctgcggtccggtgtctacctctgttttcctggaggactgcagtgactgcgtgctggcagtggcctgccaacagctccgcatacacagtacgaaaanacacccgcatcttccttgcaggtgaccagcagggccatcgtggaagactgcagtgggnatcnanttccccccttacacctggagctacccgagatcgaaaggactncnaagctctggtttaaatagaacnaaaataactggancgatgttgaanatttaactggctggcccggaanatggcctccccnaactggaatattttcntgaaaaagannnaaaatnccangggaataaccantntcccctgttntncctcctacnaaaanttttcncgntggaattttcccntnttgggccccnaaattatttatntcccncnggnttttttncccntttnaggcnaaaaatgaagggnccccnntnaatttcctaaattccaaaggnaaaaaaaaaaatttttantttttngnctnaanaaaaannnccccccc

SEQ ID NO: 58 - DNA, 1241 bp, Homo sapiens
  misc_feature (1)..(1241): n is a, c, g, or t
nttagagaaattactatgagaggatcgcatcaccatcaccatcacggatcctatttaggtgacactatagaatcgtcgacccacgcgtccggccaaggcaagatggtggactacagcgtgtgggaccacattgaggtgtctgatgatgaagacgagacgcaccccaacatcgacacggccagtctcttccgctggcggcatcaggcccgggtggaacgcatggagcagttccagaaggagaaggaggaactggacaggggctgccgcgagtgcaagcgcaaggtggccgagtgccagaggaaactgaaggagctggaggtggccgagggcggcaaggcagagctggagcgcctgcaggccgaggcacagcagctgcgcaaggaggagcggagctgggagcagaagctggaggagatgcgcaagaaggagaagagcatgccctggaacgtggacacgctcagcaaagacggcttcagcaagagcatggtaaataccaagcccgagaagacggaggaggactcagaggaggtgagggagcagaaacacaagaccttcgtggaaaaatacgagaaacagatcaagcactttggcatgcttcgccgctgggatgacagccaaaagtacctgtcagacaacgtccacctggtgtgcgaggagacagccaattacctggtcatttggtgcattgacctagaggtggaggagaaatgtgcactcatggagcaggtggcccaccagacaatcgtcatgcaatttatcctggagctggccaagagcctaaaggtggacccccgggcctgcttccggcagttcttcactaagattaanacagccgatcgccagtacatggagggcttcaacgacgagctggaagccttcaaggagcgtgtgcggggccgtgccaagctgcncatcgagaagncatgaaggantacnaggaggaggaccgcaanaagcggctcgncccggcggcctgnacccgtcnaggtctacaantccttccctgagaactccaaaatgcttcnatntnaagacttgcaaatnctncagaaccccttcncaaaatggaccccccgaccaaattacccatncancctncttnatttggccttggtcccannnttagncnccagccaagaggnaaaangcngtctgggaccttntgaacttttccaaanggcaaaaaagatnnttttanttnccattncccccctntttngccntttnncntttaaaaaaaa

SEQ ID NO: 59 - DNA, 1003 bp, Homo sapiens
  misc_feature (915)..(915): n is a, c, g, or t
  misc_feature (917)..(917): n is a, c, g, or t
  misc_feature (941)..(941): n is a, c, g, or t
  misc_feature (944)..(944): n is a, c, g, or t
  misc_feature (951)..(952): n is a, c, g, or t
  misc_feature (955)..(955): n is a, c, g, or t
  misc_feature (973)..(973): n is a, c, g, or t
  misc_feature (986)..(986): n is a, c, g, or t
  misc_feature (997)..(997): n is a, c, g, or t
tagagaaattactatgagaggatcgcatcaccatcaccatcacggatcctatttaggtgacactatagaatcgtcgacccacgcgtccgggcaaatggcggacttcgacacctacgacgatcgggcctacagcagcttcggcggcggcagagggtcccgcggcagtgctggtggccatggttcccgtagccagaaggagttgcccacagagcccccctacacagcatacgtaggaaatctacctttcaatacggttcagggcgacatagatgctatctttaaggatctcagcataaggagtgtacggctagtcagagacaaagacacagataaatttaaaggattctgctatgtagaattcgatgaagtggattcccttaaggaagccttgacatacgatggtgcactgttgggcgatcggtcacttcgtgtggacattgcagaaggcagaaaacaagataaaggtggctttggattcagaaaaggtggaccagatgacagaggcttcagggatgacttcttagggggcaggggaggtagtcgcccaggcgaccggcgaacaggcccccccatgggcagccgcttcagagatggccctcccctccgtggatccaacatggatttcagagaacccacagaagaggaaagagcacagagaccacgactccagcttaaacctcgaacagtcgcgacgcccctcaatcaagtagccaatcccaactctgctatcttcgggggtgccaggcctagagaggaagtcgttcaaaaggagcaagaatgagcctgcggttgggagggaatggggcgtggggggttagagcaggaccacagcctggtgagtccccgggcagccgtcctgcagccgccactcctgcgcctgccattggcctcctcacagcggaaaacacagcttgngnagtgcatgtcagctgttaacaagnggntttttannacntttctggggctttgctgnatctatctagggnccggttggggngttttt

SEQ ID NO: 60 - DNA, 953 bp, Homo sapiens
  misc_feature (1)..(953): n is a, c, g, or t
tgagaggtcgcatcaccatcaccatcacggatcctatttaggtgacactatagaatcgtcgacccacgcgtccgcccacgcgtccgcttctggggcacaggacgacctgaggaaggtcacccgcatcgcctactccatggtgaagcagtttgggatggcacctggcatcgggcccatctccttccctgaggcgcaggagggcctcatgggcatcgggcagcgccccttcagccaaggcctgcagcagatgatggaccatgaagcaagactgctggtggccaaggcctacagacacaccgagaaggtgctgcaggacaacctggacaagttgcaggcgctggcaaacgcccttctggaaaaggaagtgataaactatgaggacattgaggctctcattggcccgccgccccatgggccgaagaaaatgatcgcaccgcagaggtggatcgacgcccagagggagaaacaggacttgggcgaggaggagaccgaagagacccagcagcctccacttggaggcgaagagccgacttggcccaagtagttgggaggtgttggctgcacgtgcgggtggtccgggaagtgagggctcactcagccaccctgagttgcttttcagctgaggtttgcacttcctctcgcggccctcagtagtccctgcacagtgacttctgagatctgttgattgatgacccttttcatgattttaagtttctctgcagaaactactgacggagtcctgtgtttgtgagtcgtttcccctatggggaaggttatcagtgcttcccgagtgagcatggaacacttcgagttcccagggttatagacagtcgttcccagtgtggctgaggccacccagaggcagcagagcattcagactccaaacagacccctgttcatgccgacgcttgcacgaccgccccagttcctgtggctccctcggaatgctaaag

SEQ ID NO: 61 - DNA, 1034 bp, Homo sapiens
  misc_feature (1)..(1034): n is a, c, g, or t
tatgagaggatcgcatcaccatcaccatcacggatcctatttaggtgacactatagaatcgtcgacccacgcgtccgcagcaagtgttaaagatcttccaggacttaagacaccagtaggtagaggaagagcctggcttcgtttggcattaatgcaaaagaaactttcagaatatatgaaagctttgatcaataagaaagaacttctcagtgaattctacgaacccaatgccctcatgatggaagaagaaggagccataattgctggtctgttggtgggtctgaatgtcattgatgccaatttctgtatgaaaggagaagacttggactctcaggttggagttatagatttttcaatgtatctcaaggacgggaacagcagtaaaggtactgaaggagacggtcagattactgcaattctggaccagaagaactatgtagaagaactgaacagacatttgaatgctactgtaaacaaccttcaggcaaaagtagatgcattagaaaaatccaacactaaactgacagaggagcttgcagttgcaaacaacaggatcattaccttacaagaagaaatggaacgagttaaagaggaaagttcctacatactggaatccaatcggaagggtcccaagcaagacagaactgcagaagggcaagcactaagtgaagcaagaaagcatttaaaagaagagacacaattacgattggatgttgagaaagaactggagatgcagatcagcatgaggcaggagatggaattggctatgaagatgctggagaaggatgtctgtgagaagcaggatgccctggtatctcttcggcagcagctggatgacctcagagctctcaagcatgaacttgcctttaagctgcagagttcagacttaggagtaaaacagaaaagtgaactaaacagtcgcttggaagagaagactaatcagatggctgctaccattaaacaacttgaacaaagtgaaaaggatttggtgaaacaggcaaagaccttaaatagtgcagcaaataaactgatcc

SEQ ID NO: 62 - DNA, 505 bp, Homo sapiens
  misc_feature (1)..(505): n is a, c, g, or t
gaattagagaaattactatgagaggatcgcatcaccatcaccatcacggatcctatttaggtgacactatagaatcgtcgacccacgcgtccggtgatattgtagacatcaagggaatgggtactgttcaaaaaggaatgccccacaagtgttaccatggcaaaactggaagagtctacaatgttacccagcatgctgttggcattgttgtaaacaaacaagttaagggcaagattcttgccaagagaattaatgtgcgtattgagcacattaagcactctaagagccgagatagcttcctgaaacgtgtgaaggaaaatgatcagaaaaagaaagaagccaaagagaaaggtacctgggttcaactaaagcgccagcctgctccacccagagaagcacactttgtgagaaccaatgggaaggagcctgagctgctggaacctattccctatgaattcatggcataataggtgttaaaaaaaaaaataaaggacctctgggctac

SEQ ID NO: 63 - DNA, 943 bp, Homo sapiens
  misc_feature (1)..(943): n is a, c, g, or t
tgagaggatcgcatcaccatcaccatcacggatcctatttaggtgacactatagaatcgtcgacccacgcgtccgggcggaagtaccagtcaaagaagaagttgaatctcttcaagttaacacccttcatggtcaactccgtccttgctgaagggaagggtggattcataagagccaagcttgtgtgtaagactctagaaaacttctttgcctcggctgacgaagagctgaccattgatcacgtgcctatttggtgtaagaacagccaaggacagagagtcatggttgagcagagtgaaaaactgaatggtgtccttgaagcgagccgcctctgggataacatgcggaagctgggggagtgcacagaagaggcgcaccagatgactcatgacggctacttgaaactctggcagctgagcaagccttcgctggcctcttttgacgccatctttgtggatgaggcccaggactgcacaccagctatcatgaacatagttctgtctcagccatgtgggaaaatctttgtaggggacccgcaccagcagatctataccttccggggtgcggtcaacgccctgttcacagtgccccacacccacgtcttctatctcacgcagagttttcggtttggtgtggaaatagcttatgtgggagctactatcttggatgtttgcaagagagtcaggaaaaagactttggttggaggaaaccatcagagtggcattagaggtgacgcaaaggggcaagtggccttgttgtcccggaccaacgccaacgtgtttgatgaggccgtacgggtgacggaaggggaattcccttcaaggatacatttgattggggggattaaatcatttggattggacagaatcattgatatttggatccttcttcagccagaggaagaacggaggaaacaaaacctcgtcattaaagacaaatttat

SEQ ID NO: 64 - DNA, 919 bp, Homo sapiens
  misc_feature (1)..(919): n is a, c, g, or t
tatgagaggatcgcatcaccatcaccatcacggatcctatttaggtgacactatagaatcgtcgacccacgcgtccgaccacgtggagatggctcgggagcgctccaagaccgtcacctccttttacaaccagtcggccatcgacgcggcagcggagaagccctcagtccgcctaacgcccaccatgatgctctacgctggccgctctcaggacggcagccaccttctgaaaagtgctcggtacctgcagcaagaacttccagtgaggattgctcaccgcatcaagggcttccgctgccttcctttcatcattggctgcaaccccaccatactgcacgtgcatgagctatatatccgtgccttccagaagctgacagacttccctccgatcaaggaccaggcggacgaggcccagtactgccagctggtgcgacagctgctggatgaccacaaggatgtggtgaccctcttggcagagggcctacgtgagagccggaagcacatagaggatgaaaagctcgtccgctacttcttggacaagacgctgacttcgaggcttggaatccgcatgttggccacacatcacctggcgctgcatgaggacaagcctgactttgtcggcatcatctgtactcgtctctcaccaaagaagattattgagaagtgggtggactttgccagacgcctgtgtgagcacaagtatggcaatgcgccccgtgtccgcatcaatggccatgtggctgcccggttccccttcatccctatgccactggactacatcctgccggagctgctcaagaatgccatgagagccacaatggagagtcacctagacactccctacaatgtcccagatgtggtcatcaccatcgccaacaatgatgtcgatctgatcatcaggatctcagaccgtggtgga

SEQ ID NO: 65 - DNA, 953 bp, Homo sapiens
  misc_feature (1)..(953): n is a, c, g, or t
ctatgagaggatcgcatcaccatcaccatcacggatcctatttaggtgacactatagaatcgtcgacccacgcgtccgagcttttcagtcgcatttttaactgcaacccagatgatatggcacgggacctagagcagggtgacgtgtcagagacaatcagagtcttctttgagcagagcaagtctttccccccagctgccaagagcctccttaccatccaggaagtggatgagttccttctgcggctgtccaagctcaccaaggaggatgagcagcaacaggccctacaggacattgcctccaggtgtacagccaatgaccttaaatgcatcatcaggttgatcaaacatgatctgaagatgaactcaggtgcaaaacatgtgttagacgcccttgaccccaatgcctatgaagccttcaaagcctcgcgcaacctgcaggatgtggtggagcgggtccttcacaacgcgcaggaggtggagaaggagccgggccagagacgagctctgagcgtccaggcctcgctgatgacacctgtgcagcccatgttggcggaggcctgcaagtccgttgagtatgcaatgaagaaatgtcccaatggcatgttctctgagatcaagtacgatggagagcgagtccaggtgcataagaatggagaccacttcagctacttcagccgcagtctcaagcccgtccttcctcacaaggtggcccactttaaggactacattccccaggcttttcctgggggccacagcatgatcttggattctgaagtgcttctgattgacaacaagacaggcaaaccactgccctttgggactctgggagtacacaagaaagcagccttccaggatgctaatgtctgcctgtttgtttttgattgtatctactttaatgatgtcagcttgatggacagacctctgtgtgagcggcggaagtttcttcatgac

SEQ ID NO: 66 - DNA, 1212 bp, Homo sapiens
  misc_feature (1)..(1212): n is a, c, g, or t
naatagagagattactatgagaggatcgcatcaccatcaccatcacggatcctatttaggtgacactatagaatcgtcgacccacgcgtccggtgaaattggggaggccactgagcacctgactcagctcgaggcagacctgacagatgtgcaagatgagaacttcaatgccaaccatgcactaagtggtctggagcgagataggcttgcacttaatctcacactgcggcagctcgaccagcatcttgacttgctcaaacattcaaacttcctgggtgcctatgacagcatccggcatgcccatagccagtctgcagaggcagaacgtcgtgccaatacctcagccctggcagtacctagccctgtgagcaactcggcaagtgctcggcatcggacagaggcactgatggatgctcagaaggaggacttcaacagcaaacacatggccaaccagcgggcacttggcaagctctctgcccatacccacaccctgagcctgacagacataaatgagctggtgtgtggggcaccaggggatgcaccctgtgctacaagcccttgtgggggtgccggctgtcgagatgaggatgggcagccgcgctgtgggggcctcagctgcaatggggcagcggctacagcagacctagcactgggccgggcccggcacacacaggcagagctgcagcgggcactggcagaaggtggtagcatcctcagcagagtggctgagactcgtcggcaggcaagcgaggcacagcagcgggcccaggcagccctggacaaggctaatgcttccagggggacaggtggaacaggccaaccaggaacttcaagaacttatccagagtgtgaaggacttcctcaaccaggagggggctgatcctgatagcattgaaatggtggccacacgggtgctanagctctccatcccagcttcagctgancanatccagcacctggcgggtgcgattngcaaaacgagtccggaacctggcaaangtggatgcnatcntggcactactgtaanaaangtgcgtcntgccaaacactactgcagaatgcacggnggcaagaacttggctgagatnaaaaacaaangcaaaangtacggccnccctgaagaaggccnccggcnaagggattgccagggccctcggggggnangggtgaaccngnaanaaannaacntttccnnttanngaaanaaggngg

SEQ ID NO: 67 - DNA, 1045 bp, Homo sapiens
  misc_feature (1)..(1045): n is a, c, g, or t
naatagagaaattactatgagaggatcgcatcaccatcaccatcacggatcctatttaggtgacactatagaatcgtcgacccacgcgtccggaaaatctatggaaagagaaggctacgagtcctcgggcaatgatgactacaggggtagttacaacaccgtgctctcacagcctttatttgaaaagcaggacagagaaggtccagcctccacgggaagcaaactcaccattcaggaacatctgtaccccgcgccttcatcacctgagaaagaacagctgctggaccgcagacccactgaatgtatgatgtcgcgatcagtagatcacctcgagagacctacgtccttcccacggcccggccagttaatctgctgcagttctgtcgaccaggtcaatgacagcgtttacaggaaagtactgcctgccttggtcatcccggctcattatatgaaactccccggggaccactcctatgtcagccagcccctcgtcgtcccggctgatcagcagcttgagatagaaagactacaggctgagctgtccaatccccatgccgggatcttcccacacccgtcctcacagatccagccccagcccctgtcttcccaggccatctctcagcagcacctgcaggatgcgggcacccgggagtggagccctcagaacgcatccatgtcggagtctctctccatcccagcttccctgaacgacgcggctttggctcanatgaacagtgangtgcagctcctgactgaaaaggcccttgatggagcttggggggtgggnaagccgcttccgcacccccgggcgtggnttcgttctcnttgganggcnaggtccaacgctcncgttaaaacanttccataanattgatctccaaaaaagctggnaangaaacggnaanttantgatgnccnngttttggaattctngncgtaaannattnaaatgaaccnaaaatccnaccccggaaagggaaanggaaatgccttttgttncncttncanaaaaanttancccncnctttccnaaaaancaccaann

SEQ ID NO: 68 - DNA, 810 bp, Homo sapiens
  misc_feature (1)..(810): n is a, c, g, or t
ttaagaggagaattaactatgagaggatcgcatcaccatcaccatcacggatcctatttaggtgacactatagaatcgtcgacccacgcgtccgcacggaccagcagctcctttgcagcagccatggcccggctgggaggtgctgtgctcagcttctcggaagccacatcgtccgtccagaagggcgaatccctggctgactccgtgcagaccatgagctgctatgccgacgtcgtcgtgctccggcacccccagcctggagcagtggagctggccgccaagcactgccggaggccagtgatcaatgctggggatggggtcggagagcaccccacccaggccctgctggacatcttcaccatccgtgaggagctgggaactgtcaatggcatgacgatcacgatggtgggtgacctgaagcacggacgcacagtacattccctggcctgcctgctcacccagtatcgtgtcagcctgcgctacgtggcacctcccagcctgcgcatgccacccactgtgcgggccttcgtggcctcccgcggcaccaagcaggaggaattcgagagcattgaggaggcgctgcctgacactgatgtgctctacatgactcgaatccagaaggaacgatttggctctacccaggagtacgaagcttgctttggtcagttcatcctcactccccacatcatgacccgggccaagaagaagatggtggtgatgcacccgatgccccgggtcaacgagaaaagcgtggaagtggactcggatncccgcgcagcctacttccgccaggntganaacggcatgtac

SEQ ID NO: 69 - DNA, 727 bp, Homo sapiens
  misc_feature (1)..(727): n is a, c, g, or t
ttnattaaagaggagaaatnacttgagaggatcgcatcaccatcaccatcacggatcctatttaggtgacactatagaatcgtcgacccacgcgtccgggctgctcttcatggctaatgaagcagacttggatgaagagctggtcattaagggatccatcctacagaagcatcctagaatacgtttccacacgggtcttgtggatgcccacctctactgtttgaaaaaatacatcgtggatttcctaatggaaaatgggtcaataaccttctatnccggaggggaacctggtttccatatttaagggagaaaacaggttttccttagcttnctcacaacagggccaagaanaaaaagaggggggtttaaaanaaaaaggngccggaggccccttaaaattttnanaggntttttaaaaaaaagcccaaacccctggaacccggggtccccttttaaaaacccccnctggnaaaacccccntcccnnnggnaaacaagggggggaaaaaattttttncccaaaaaaaaanagggggggccgggttntttgtnccccccatntaaaaaaaaaaaggggggctntttntntttttnggggggngaacncccncnggggggcctnttntttggngggnaaaaaanaanaannangggggggcccccaaaaaaggggggggggggnctnttttttttncccnnaaaaaaaaacccccccccccttttttttt

SEQ ID NO: 70 - DNA, 912 bp, Homo sapiens
  misc_feature (1)..(912): n is a, c, g, or t
actatgagaggatcgcatcaccatcaccatcacggatcctatttaggtgacactatagaatcgtcgacccacgcgtccggtgctcctgagccctccaccatcgcccgctctctaccaaccactgtcccagagtcaccaaactaccgcaacaccaggacccctcgcactccccggacaccacagctcaaagactcaagccagacatcacggttttacccagtggtgaaagaaggacggacactggatgccaagatgcctcgaaaaagaaagacaagacacagttcaaacccacccttggagagccatgtgggctgggtgatggattcccgtgagcacaggccccgtactgcttccatcagctccagcccctcagaagggacgcctacagttggcagctatggctgtacccctcagtcattgcccaagttccagcatccttcccatgaactgctcaaggaaaatggcttcacacaacacgtctaccataagtatcgtaggcgctgccttaatgagcggaaacgcttgggcattggccagtctcaggagatgaacacactcttccgcttctggtccttcttcctccgagatcacttcaacaaaaagatgtatgaggagttcaagcagctggctctggaggacgccaaagaaggctacagatatggtttggagtgcctttttcgatactacagttatggcctggaaaagaagttccggctggacatattcaaggattttcaggaggaaacggtgaaggactatgaagctggccaactgtatgggctggagaagttctgggccttcttgaaatattccaaagccaaaaatttggacattgaccccaaactgcaagaatacctcggcaaattccgacgtcttgaagacttccgagtagatccccccatgggtgaggag

SEQ ID NO: 71 - DNA, 1212 bp, Homo sapiens; identical to SEQ ID NO: 66
  misc_feature (1)..(1212): n is a, c, g, or t

SEQ ID NO: 72 - DNA, 1195 bp, Homo sapiens
  misc_feature (1)..(1195): n is a, c, g, or t
taattagagaaattactatgagaggatcgcatcaccatcaccatcacggatcctatttaggtgacactatagaatcgtcgacccacgcgtccggcctggcaatggggaactctgagggctgcaataccaagaaggagggtgacctgatagctgctcaggctcggctgaaggacctggaggctctgctgaactccaaggaggccgcactgagcactgctctcagtgagaagcgcacgctggagggcgagctgcatgatctgcggggccaggtggccaagcttgaggcagccctaggtgaggccaagaagcaacttcaggatgagatgctgcggcgggtggatgctgagaacaggctgcagaccatgaaggaggaactggacttccagaagaacatctacagtgaggagctgcgtgagaccaagcgccgtcatgagacccgactggtggagattgacaatgggaagcagcgtgagtttgagagccggctggcggatgcgctgcaggaactgcgggcccagcatgaggaccaggtggagcagtataagaaggagctggagaagacttattctgccaagctggacaatgccaggcagtctgctgagaggaacagcaacctggtgggggctgcccacgaggagctgcagcagtcgcgcatccgcatcgacagcctctctgcccagctcagccagctccagaagcagctggcagccaaggaggcgaagcttcgagacctggaggactcactggcccgtgagcgggacaccagccggcggctgctggcggaaaaggagcgggagatggccgagatgcgggcaaggatgcancagcagctggacgagtaccaggagcttctggacatcaagctggccctggacatggagatccacgcctaccgcaagctcttggaaggcnangaagaaaggctacccctgtcccccagccctacctcgcancgcanccgtggccgtgcttcctctcctcatcccaaaaacagggtgggggcagcgtcnccaaaancncnaactggantccntgaaagcccaacagttttcaagcacgcacgcataacggcccntgncctgaananntnnaataaanangccaatttntccgctgcccacaatccatgagaacatcctggcantngnaatanncccaanggaaaatcctngttaatncggttccnaaattnccn

SEQ ID NO: 73 - DNA, 1125 bp, Homo sapiens
  misc_feature (1)..(1125): n is a, c, g, or t
nantagagaaattactatgagaggatcgcatcaccatcaccatcacggatcctatttaggtgacactatagaatcgtcgacccacgcgtccgacagagcagagcaagtcggagctgagctcacggctggacacgctgagtgcggagaaggatgctctgagtggagctgtgcggcagcgggaggcagacctgctggcggcgcanagcctggtgcgcgagacagaggcggcgctgagccgggagcagcagcgcagctcccaggagcagggcgagttgcagggccggctggcagagagggagtctcaggagcaggggctgcggcagaggctgctggacgagcagttcgcagtgttgcggggcgctgctgccgaggccgcgggcatcctgcaggatgccgtgagcaagctggacgaccccctgcacctgcgctgtaccagctccccagactacctggtgagcagggcccaggaggccttggatgccgtgagcaccctggaggagggccacgcccagtacctgacctccttggcagacgcctccgccctggtggcagctctgacccgcttctcccacctggctgcggataccatcatcaatggcggtgccacctcgcacctggctcccaccgaccctgccgaccgcctcatagacacctgcagggagtgcggggcccgggctctggagctcatggggcagctgcaggaccagcaggctctgcggcacatgcaggccagcctggtgcggacacccctgcagggcatccttcanctgggccaggaactgaaacccaanagcctanatgtgcggcanganganctgggggccgtggtcnacaangaaatggcggccacatccgcanccattgaaaatgctgtgcggangattgaggacatgatgaaccangcacgccacnccanctcgggggtgaanctggangtnaacnaaaagaatcctcaactcctgcacaaacntgatgaangctatccngctcctggtgacaanntccnctaacntgcaaaagaaatnttgaaaacnncagggggncncccccccnncagnaattttnccccaaaaannncnnttgaaccaaagcctntttngncctccaaggtntgggnttgggaac

SEQ ID NO: 74 - DNA, 1229 bp, Homo sapiens
  misc_feature (1)..(1229): n is a, c, g, or t
naatagagaaattactatgagaggatcgcatcaccatcaccatcacggatcctatttaggtgacactatagaatcgtcgacccacgcgtccgcctgcaggtattttatgcatggggtttgtaaggaaggagacaactgtcgctactcgcatgacctctctgacagtccgtatagtgtagtgtgcaagtattttcagcgagggtactgtatttatggagaccgctgcagatatgaacatagcaagccattgaaacaggaagaagcaactgctacagagctaactacaaagtcatcccttgctgcttcctcaagtctctcatcgatagttggaccacttgttgaaatgaatacaggcgaagctgagtcaagaaattcaaactttgcaactgtaggagcaggttcagaggactgggtgaatgctattgagtttgttcctgggcaaccctactgtggccgtactgcgccttcctgcactgaagcacccctgcagggctcagtgaccaaggaagaatcagagaaagagcaaaccgccgtggagacaaagaagcagctgtgcccctatgctgcagtgggagagtgccgatacggggagaactgtgtgtatctccacggagattcttgtgacatgtgtgggctgcaggtcctgcatccaatggatgctgcccagagatcgcagcatatcaaatcgtgcattgaggcccatgagaaggacatggagctctcatttgccgtgcagcgcagcaaggacatggtgtgtgggatctgcatggaggtggtctatgagaaagccaaccccagtgagcgccgcttcgggatcctctccaactgcaaccacacctactgtctcaagtgcattcgcaagtggaggagtgctaagcaatttgagagcaagatcataaagtcctgcccagaatgccggatcacatctaactttgtcattccaagtgagtactgggtggaaggaaaaagaaaaaanccaaaactcnttctgaantacnanggagncaatgaaccaacaaggcntgcaggtnttttnaatgaaggacgtgggaanctgcccanttggaaggnanctgttttttacaancatgcntncccntgatggnccgtaaaaaaggacccccnaaaaacnaaaaggngggnaanntccaagccaaaaaccggggcccaacaaagnaaccnctttcgggnaacncnttngggnaaaaaaanaannnccccccccnttn

SEQ ID NO: 75 - DNA, 1208 bp, Homo sapiens
  misc_feature (1)..(1208): n is a, c, g, or t
tagagaaattactatgagaggatcgcatcaccatcaccatcacggatcctatttaggtgacactatagaatcgtcgacccacgcgtccgcggcgcgtgggttaacagactggatagaatttgaggagatagctgatctggaagaacgggcaaagagccagttttttgaaaaggtgcatgaagaagttgtgctcaaaactcaagaggctgctaaagaaaaagagttccaaagtgtacctgctggaccagctggagcagttgagagttgtgaaatctgtcaagaacaatttgaacaatactgggatgaagaagaggaggaatggcatttgaaaaatgctattagagtagatggaaagatttatcatccatcatgttatgaagattatcaaaatacatcttcatttgattgtacaccatctcccagcaagacaccagttgaaaaccccttgaatattatgttgaacattgtcaaaaacgaattgcaggaaccctgtgacagtcccaaagttaaggaagaacgaattgatacaccaccagcttgtacagaggaaagcatagcaacaccctctgaaattaaaacagaaaatgacacagtcgagtcagtttaaataaaatgagaaaggtatgtttttcttttttaaaaaagctgctgttggatctagaaggtgaagaatttttttatgtatatatagacatatctatataaattgtctggctgaggcagggccttcagctatcatttggttaataaatacattttagtatttgcatttcctactgcctgcagagtttcaggtgcttgttgtgtgaaagttctgtagatgtgtgcaaatttaacgaaatgaaattgtatgtgtaaaaatgtacgatttttcactgtgcaactgtaaattataaataaaaatatttttgctattcntggagtgtaatatttatgcacnccatcnaatagtttccngtactttttatngggtaaaatgggattgaanancacccccacataanatttttttctagtaccctcccctgattaaagaancaggtttgagnttcctccctccaaagggggtncccananancnccnntanggcttttccnaaaaaaancccgattttgaaaaattttaanaaaaaaaaggaanatttttgcnaaattantttntattacccaacccctccccggttaaaaaacccccnaagtnccntttn

SEQ ID NO: 76 - DNA, 1148 bp, Homo sapiens
  misc_feature (1)..(1148): n is a, c, g, or t
gagagattactatgagaggatcgcatcaccatcaccatcacggatcctatttaggtgacactatagaatcgtcgacccacgcgtccgtgaaaaaagtggagaagtctgttaatgaagtgatggaatggatgaataatgtcatgaatgctcaggctaaaaagagtcttgatcaggatccagttgtacgtgctcaggaaattaaaacaaaaatcaaggaattgaacaacacatgtgaacccgttgtaacacaaccgaaaccaaaaattgaatcacccaaactggaaagaactccaaatggcccaaatattgataaaaaggaagaagatttagaagacaaaaacaattttggtgctgaacctccacatcagaatggtgaatgttaccctaatgagaaaaattctgttaatatggacttggactagataaccttaaattggcctattccttcaattaataaaatatttttgccatagtatgtgactctacataacatactgaaactatttatattttcttttttaaggatatttagaaattttgtgtattatatggaaaaagaaaaaaagcttaagtctgtagtctttatgatcctaaaagggaaaattgccttggtaactttcagattcctgtggaattgtgaattcatactaagctttctgtgcagtctcaccatttgcatcactgaggatgaaactgacttttgtcttttggagaaaaaaaactgtactgcttgttcaagagggctgtgattaaaatctttaagcatttgttcctgccaaggtagttttcttgcattttgctctccattcagcatgtgtgtgggtgtggatgtttataaacaagactaagtctgacttcataagggctttctaaaaccatttctgtcccagaagaaaatgacntttttgctttgatattaaaaattcaatgagtaaaacaaaagcctagtccaaaggggttaaccancatgcanaacaaaaacntttaaccttccnctccccctaacagaaantgncntgngaaaatgngganggaanaatggnccatccngtgnnactgattgggacccttttttgacctttaaanaaagtccacnttaagggggcctttcnaaaaaaaaaaannnnnnnaaannnnnnnaggggcgc

SEQ ID NO: 77 - DNA, 640 bp, Homo sapiens
  misc_feature (1)..(640): n is a, c, g, or t
gaatataaaaattatttgctttgtgagcggatanatntatgattnattgtgagcggataacaatttncacagaattattaaagaggagaaattactatgagaggatcgcatcaccatcaccatcacggatcctatttaggtgacactatagaatcgtcgacccacgcgtccggggacagcgaaatggaggggtgtgtgtctaacctaatggtctgcaacctggcctacagcgggaagctggaagagttgaaggagagtattctggccgataaatccctggctactagaactgaccaggacagcagaactgcattgcactgggcatgctcagctggacatacagaaattgttgaatttttgttgcaacttggagtgccagtgaatgataaagacgatgcaggttggtctcctcttcatattgcggcttctgctggccgggatgagattgtaaaagcccttctgggaaaaggtgctcaagtgaatgctgtcaatcaaaatggctgtactcccttacattatgcagcttcgaaaaacaggcatgagatcgctgtcatgttactggaaggcggggctaatccagatgctaaggaccattatgaggctacagcaatgcaccgggcagcagccaagggtaacttga

SEQ ID NO: 78 - DNA, 1012 bp, Homo sapiens
  misc_feature (1)..(1012): n is a, c, g, or t
taatagagaaattactatgagaggatcgcatcaccatcaccatcacggatcctatttaggtgacactatagaatcgtcgacccacgcgtccggctgtgacgactcagccctggcacgaagcccagcccgcggcctgctgggctctcggctgagcaaaatctattcccagtccaccctgtcactgtccactgtggccaacgaggcccacaataacctcggggtgaagaggcccacgtctcgggctccctccccgtcaggtctcatgtccccaagccgcctgcctggaagccgcgaacgggactgggaaaatggcagcaatgcctcctccccagcgtcagtgcccgagtacacaggtccacggctgtacaaagaacccagcgccaagtccaacaagttcatcatccacaatgccctatcacactgctgcctggcgggcaaggtgaacgaaccgcagaagaatcgcattctggaggaaattgagaaaagcaaggccaaccacttcctgatcctctttcgcgactcgagctgccagttccgggcgctctacacgctgtcgggggagacagaggagctgtcgcggctggcagggtatgggccccggaccgtcacgcccgccatggtggaaggcatctacaagtacaactcggaccgcaagcgcttcacccagatccccgccaagaccatgtccatgagcgtcgatgccttcaccatccagggacacctctggcagggcaagaaacccaccactcccaagaagggcggcggcacccccaaatagccccacccgggcggtccacgggccgggccctgtgtgctgcggccgctccctatantgagtcntattaancttaattanctgancttggactcctgttgatanatncantaatgacctcanaactccatctggatttgttcanaacgctcggttgccnccgggngtttttttnttggngaaaatccaanctannttggnnannattttnngganntaaggaanntnaaatggnaa

SEQ ID NO: 79 - DNA, 1229 bp, Homo sapiens; identical to SEQ ID NO: 74
  misc_feature (1)..(1229): n is a, c, g, or t

SEQ ID NO: 80 - DNA, 1024 bp, Homo sapiens; identical to SEQ ID NO: 7
  misc_feature (1)..(1024): n is a, c, g, or t

SEQ ID NO: 81 - DNA, 819 bp, Homo sapiens; identical to SEQ ID NO: 18
  misc_feature (1)..(819): n is a, c, g, or t

SEQ ID NO: 82 - DNA, 1127 bp, Homo sapiens
  misc_feature (1)..(1127): n is a, c, g, or t
acttaaggacgagattactatgagaggtcgcatcaccatcaccatcacggtcgacccacgcgtccgggcggcggcggcgggagcagcatggattggggcactgagctgtgggatcagttcgaggtgctcgagcgccacacgcagtgggggctggacctgttggacagatatgtaaagttcgtgaaagaacgcaccgaagtggaacaggcttacgccaaacaactgcggagcctggtgaaaaaatatctgcccaagagacctgccaaggatgatcctgagtccaaattcagccagcaacagtccttcgtacagattctccaggaggtgaatgactttgcaggccagcgggagctggtggctgagaacctcagtgtccgtgtatgtcttgagctgaccaagtactcacaagagatgaaacaggagaggaagatgcacttccaagaagggcggcgggcccagcagcagctggaaaatggctttaaacagctggagaatagtaagcgtaaatttgagcgggactgccgggaggcagagaaggcagcccagactgctgaacggctagaccaggatatcaacgccaccaaggctgatgtggagaaggccaagcagcaagcccaccttcggagtcacatggccgaagaaagcaaaaacgaatatgcggctcaactgcagcgcttcaaccgagaccaagcccacttctatttttcacagatgccccagatattcgataagctccaagacatggatgaacgcagggccacccgcctgggtgccgggtatgggctcctgtcggaggccgagctggaggtggtgcccataatagccaagtgcttggagggcatgaaggtggctgcaaatgctgtggatcccaagaacgactcccacgtccttatagagctgcacaagtcaggttttgcccgcccgggcgacgtggaaatcgaggacttcagccagcccatgaaccgtgcaccctccgacagcagtctgggcaccccctcggatggacggcctgactccgaggcccgggtcgcagccgcaccagcgctggcctttggcagagacagacagtgtgacgagatttagcacttgccccaggagcagcagcgaaacggctcaacagcagttgg

SEQ ID NO: 83 - DNA, 1276 bp, Homo sapiens
  misc_feature (1)..(1276): n is a, g, c, or t
agaaattactatgagaggatcgcatcaccatcaccatcacggatcctatttaggtgacactatagaatcgtcgacccacgcgtccgcgagaggccagctcagacctcccggctcgacaggcggcgcgggcggcggtaaaatgtcggttccaggaccttaccaggcggccactgggccttcctcagcaccatccgcacctccatcctatgaagagacagtggctgttaacagttattaccccacacctccagctcccatgcctgggccaactacggggcttgtgacggggcctgatgggaagggcatgaatcctccttcgtattatacccagccagcgcccatccccaataacaatccaattaccgtgcagacggtctacgtgcagcaccccatcacctttttggaccgccctatccaaatgtgttgtccttcctgcaacaagatgatcgtgagtcagctgtcctataacgccggtgctctgacctggctgtcctgcgggagcctgtgcctgctggggtgcatagcgggctgctgcttcatccccttctgcgtggatgccctgcaggacgtggaccattactgtcccaactgcagagctctcctgggcacctacaagcgtttgtaggactcagccagacgtggagggagccgggtgccgcaggaagtcctttccacctctcatccagcttcacgcctggtggaggttctgccctggtggtctcacctctccagggggcccaccttcatgtcttcttttggggggaatacgtcgcaaaactaacaaatctccaaaccccagaaattgctgcttggagtcgtgcataggacttgcaaagacattccccttgagtgtcagttccacggtttcctgcctccctgagacccctgagtcctgccatctaactgtgatcattgnccctatccgaatatctttcntgtgatctgccatcantggctcttttttcctgcttccatgggcctttctggnggcattctcnaactgaaaanccnagttgccttattttttgaagctgttctgnccaaanctcggctgaaccancctttaangcctaacattatcttatcngtctcttccngtccnnaaanaaaaaatnttgcntaaaaanttnaaggntgggttttnaaatntgtaactgcaaanttctnaaccaanaaattcccttaantnctnaattttttttttaaaaaaaangngggggnnnnaaaccccgnaaaaaatttcccaaggnntnaantnttgcnaaaaaaaaggggg

SEQ ID NO: 84 - DNA, 1426 bp, Homo sapiens
  misc_feature (1)..(1426): n is a, c, g, or t
nnggctaatctcnncctaagaatactatagaggatcgcatcaccatcaccatcacggtcgacccacgcgtccgcgtaaagctaatccacaggataaagtacatcccaataaagcggaattcatcagagccaagtatcagatgttagcgttcgtccatcgcttgccctgccgggatgacgatagtgtgactgccaaagatcttagcaagcaactccattcgagcgtgagaacagggaatcttgaaacctgtttgagactgttatctttaggagcacaagccaacttctttcatcctgaaaaaggaaacaccccactccatgttgcctccaaagcagggcagattttacaggctgaattattggcagtatatggagcagacccaggcacacaggattctagtgggaaaactcccgttgattatgcaaggcaaggagggcaccatgagctggcagagcgcctcgtggaaatacagtatgagctaacggacagactagccttctatctctgtggcaggaaaccagatcacaaaaatggacagcactttataatacctcaaatggcagacagcagcctggatttgtctgaattggcaaaagctgctaagaagaaacttcaatctctaagtaatcatttgtttgaagaacttgccatggatgtgtacgatgaagttgacaggcgagagacggatgcagtctggcttggcacgcaaaaccacagcgccctggtaaccgagancacggtcgtcccctttcttccnggtcatcctgagtactcatncacacgaaatcagggcagacagaaagtagctcggttcaacgcccatgagttngccacgctggtcattgacattctcagtgacgccagaagagacggcaaggcagtcccctctccgggtcaaagaacatgtggagctcatactgaaaaccatcattaccagcccggcgttaaagtcaagacaacgatcacccgactatgacggcgggcattaaacgagacccagaattgggaacccttgaaacaaaacaaccggaaaaattggtttggaaaatggctattttgggaaggggcaccccctttgggggattttcccaaaaggggccttcaaaaaaaaattgaaagccccccaaaaaaaaaaaagggggccccgccccctgggccccaaaataggtgggacccccgggaaaaccccaaaaccccaacccccggtgtttttacaacccccggcccgcggggtttttttttgaaaaccccctctcggggatattgccgggaagaataaggagaaaaacctgtacccccgtttatcccgcgggaaaaaaatgtgttttcctctgcacaaaacccaccggtgttttcttcttaaaaaaaaaaaaattcctctttcctccccccgcgcccctaaaaaaaagaggggggggcctccccc

SEQ ID NO: 85 - DNA, 897 bp, Homo sapiens
  misc_feature (1)..(897): n is a, c, g, or t
cgcatcaccatcaccatcacggatcctatttaggtgacactatagaatcgtcgacccacgcgtccgcccacgcgtccgtgctgctcaagaagaagcgataccaggagcagctcctggacaggacggagaaccagatcagcagcctggaggccatggttcagagtattgagttcacccagatcgaaatgaaagtgatggaggggctgcagtttggaaatgagtgtctgaacaagatgcaccaggtgatgtccattgaagaggtggagaggatcctggacgagacgcaggaggccgtggagtaccagcggcaaatagacgagctcctggcaggaagcttcactcaggaggatgaagacgccatcctggaggagctgagcgcaatcactcagggacaagctgaggcagtaccagaagatcccagaaaacgtccctgtcaaggccaggcccaggcaggcggagctggtggcagcttcgtaacgtggcctcgtcttgtgggactcacggggatgccccagggactgtggcccacagagagtttgggtcacggccagcccctgaccgggttccctggagcccagtgcgcacggtgctgagcagagctgcagccacgcaggcgcattgcaggaggactccagagcgtctcctggagaccttgagcctgaacgcactcaggcgccactggcctgctctcagtccggattaactctcgaccgagcccagcttctgccggttgtgggctcccccggtggccgaggcccaggcccaacgcctctggtgctgttcccctgcagtcccagccccgcgtggctcgcgctcgtctgtgaggaagacacctccagaccttggggtccccgcgcttcctcttgctcctcgctgctcccattagctggtgcaggc

SEQ ID NO: 86 - DNA, 1179 bp, Homo sapiens
  misc_feature (1)..(1179): n is a, c, g, or t
atagagaaattacnatgagaggatcgcatcaccatcaccattcacggatcctatttaggtgacactatagaatcgtcgacccacgcgtccgctctcggcacaagcatgtacggcaaaggcaagagtaacagcagcgccgtcccgtccgacagccaggcccgggagaagttagcactctacgtatatgaatatctgctccatgtaggagctcagaaatcagctcaaacatttttatcagagataagatgggaaaaaaacatcacattgggggaaccaccaggattcttacattcttggtggtgtgtattttgggatctctactgtgcagctccagagagacgtgaaacatgtgaacactcaagtgaagcaaaagccttccatgattacagtgctgcagcagctcccagtccagtgctaggaaacattcccccaggagatggcatgccagtaggtcctgtaccaccagggttctttcaggcacttggaggtgtcccaggaagtcagccattactccccagtggaatggatccaactcgacaacaaggacatccaaatatgggtgggccaatgcagagaatgactcctccaagaggaatggtgcccttaggaccacagaactatggaggtgcaatgagacccccactgaatgctttaggtggccctggaatgcctggaatgaacatgggtccaggtggtggtagaccttggccaaacccaacaaatgccaattcaataccatactcctcagcatctcctgggaattatgtaggtcctccaggaggtggagggccaccaggaacacccatcatgcctagtccagcagattcaaccaactctggtgataacatgtatactttaatgaatgcagtacctcctggacctaacagacctaattttccaatgggccctgggtcanatggntcccatgggtggattaggaggaatggagtcncatcncatgaatggnctctttaggctcagaanatatggacagtanttccaaaaattctccnataaaatgaancctgaataatcanccgggncctccaagggatgatggncaaaatgggggggaaantttcttaaattcnttttcnaagngaaanttactcccctaacntgganangagnggggngatccnttaccaagtcccccnagnaaaacccnagggantcncc

SEQ ID NO: 87 - DNA, 855 bp, Homo sapiens
  misc_feature (1)..(855): n is a, c, g, or t
tnanaggagaattaactatgagaggatcgcatcaccatcaccatcacggatcctatttaggtgacactatagaatcgtcgacccacgcgtccgaagtgctgtgggtccctggttcagatcatgcaggaattgctacacaagctgtggtggagaaacaactgtggaaggaacggggagtgaggagacatgagctgagccgggaggccttccttagggaggtgtggcagtggaaggaggcgaaaggtggagagatctgtgagcagctgcgagctctgggtgcctccctggactgggatcgagagtgttttaccatggatgttggctcctcagtggctgtgactgaagcttttgtgcggctctacaaggcggggttgctgtaccggaaccatcagcttgtcaactggtcatgtgctttaagatcagccatctcggacattgaggtggagaaccggcccctgcctggccacacacagcttcgactgcctggctgccccacccccgtgtcttttggcctcctattttctgttgccttccccgtggatggagagcctgatgcagaggttgtggtaggaaccacaaggccagagacgctgcctggagatgtggctgtggccgttcatccagacgactcgcgatacacacatctacacgggcgacagcttcgtcaccccttgatggggcagcctcttcccctcatcacagactatgctgttcagccacatgtgggccacgggggcagtgaaggtgactccagctcacagtcctgccgatgctgaaatgggggccccgacatggntttgagcccccttgaatgtcattgcgggaggatgggaccatgnacctcccctctggggg

SEQ ID NO: 88 - DNA, 848 bp, Homo sapiens
  misc_feature (1)..(848): n is a, c, g, or t
tnaactatgagaggatcgcatcaccatcaccatcacggatcctatttaggtgacactatagaatcgtcgacccacgcgtccggtgctgatattgaaacaattggagaaattctgaagaaaatcatccctaccttggaagagggcctgcagttgccatcacccactgcaaccagccagctcccgctcgaatctgatgctgtggaatgcttaaattaccaacactataaaggaagtgactttgactgcgagttgaggctgttgattcatcagagtctagcaggaggaattattggggtcaaaggtgctaaaatcaaagaacttcgagagaacactcaaaccaccatcaagcttttccaggaatgctgtcctcattccactgacagagttgttcttattggaggaaaacccgatagggttgtagagtgcataaagatcatccttgatcttatatctgagtctcccatcaaaggacgtgcacagccttatgatcccaatttttacgatgaaacctatgattatggtggttttacaatgatgtttgatgaccgtcgcggacgcccagtgggatttcccatgcggggaagaggtggttttgacagaatgcctcctggtcggggtgggcgtcccatgcctccatctagcagagctcggaatcttcntctttccctccaccaccaccacctagaggggggagacctcatggccctatgnacanaaagagggagacctgggagacccgttacnacggcatggntgggtttcaggggctgaatgaaacttggggactctggcaatnanataactggnagccccatccaaaaatggcaanatggncttaatgaaacccc

SEQ ID NO: 89 - DNA, 1176 bp, Homo sapiens
  misc_feature (1)..(1176): n is a, c, g, or t
tagagaaattactatgagaggatcgcatcaccatcaccatcacggatcctatttaggtgacactatagaatcgtcgacccacgcgtccgagccgccatcttgtgggagcaaaaccaacgcctggctcggagcagcagcctctgaggtgtccctggccagtgtccttccacctgtccacaagcatggggaacatcttcgccaacctcttcaagggcctttttggcaaaaaagaaatgcgcatcctcatggtgggcctggatgctgcagggaagaccacgatcctctacaagcttaagctgggtgagatcgtgaccaccattcccaccataggcttcaacgtggaaaccgtggagtacaagaacatcagcttcactgtgtgggacgtgggtggccaggacaagatccggcccctgtggcgccactacttccagaacacacaaggcctgatcttcgtggtggacagcaatgacagagagcgtgtgaacgaggcccgtgaggagctcatgaggatgctggccgaggacgagctccgggatgctgtcctcctggtgttcgccaacaagcaggacctccccaacgccatgaatgcggccgagatcacagacaagctggggctgcactcactacgccacaggaactggtacattcaggccacctgcgccaccagcggcgacgggctctatgaaggactggactggctgtccaatcagctccggaaccagaagtgaacgcgacccccctccctctcactcctcttgccctctgctttactctcatgtggcaaaacgtgcggctcgtggtgtgagtgccanaagctgcctccgtggttttggtcaccgtgtgcatcgcaccgtgctgtaaatgtggcaaangcancctgcggcccaggctttttatttaatgtaaatagtttttgtttccaatgnaggcantttnctggtactcnatgcaatattactcncttttttttattgtaaaaaanaaaaatcanctcnctgttcanggctgaaaagggnatgtaggcccatgggcncctggcctccanaatccttnnnttnggaaaaaccgnccncccccttggnttttaaantgngnttgaaanccattttngggggngggttttnaaccaaacccnnggnatttttttnaaaaaattaaaaannccnanncnnaaaa

SEQ ID NO: 90 - DNA, 6279 bp, Homo sapiens
  misc_feature (1)..(6279): n is a, c, g, or t
gtgtgtgtggaggccagtatgaagctgaaaaagcaggtgacagtgtgtggggctgccatcttctgtgtggcagtcttctcgctctacctcatgctggaccgagtgcaacacgatcccacccgacaccagaatggtgggaacttcccccggagccaaatttctgtgctgcagaaccgcattgagcagctggagcagcttttggaggagaaccatgagattatcagccatatcaaggactccgtgctggagctgacagccaacgcagagggcccgcccgccatgctgccctactacacggtcaatggctcctgggtggtgccaccggagccccggcccagcttcttctccatctccccgcaggactgccagtttgctttggggggccggggtcagaagccagagctgcagatgctcactgtgtcggaggagctgccgtttgacaacgtggatggtggtgtgtggaggcaaggcttcgacatctcctacgacccgcacgactgggatgctgaagacctgcaggtgtttgtggtgccccactctcacaatgacccaggctggatcaagacctttgacaagtactacacagagcagacccaacacatcctcaatagcatggtgtctaagctgcaggaggacccccggcggcgcttcctctgggcagaggtctccttcttcgccaagtggtgggacaacatcaatgtccaaaagagagcggcagtccgaaggctggtgggaaacgggcagctggagattgcgacaggaggctgggtgatgccagatgaggccaattcccactactttgcattgattgaccagctcatcgaaggacaccagtggctggagagaaatcttggtgcaaccccccgctctggctgggcagtggacccctttggatacagctccaccatgccttacctgctgcgccgtgccaacctcaccagcatgctgattcagagagtgcactatgccatcaagaagcactttgctgccacccacagcctagagttcatgtggaggcagacatgggactcggactccagcacagacatcttctgtcacatgatgcccttctacagctatgacgtcccccatacctgtggcccagatcccaagatctgctgccaatttgatttcaaacgcctgcctggtgggcgcatcaactgcccttggaaggtgccaccccgggccatcacagaggccaacgtggcagagagggcagccctgcttctggaccaataccggaagaagtcccagctgttccgaagcaacgtcctcctggtgcctcttggagatgacttccgatatgacaagccccaggagtgggatgcccagttcttcaactaccaacggctctttgacttcttcaacagcaggcctaacctccatgtgcaggcccagtttggcactctttctgactattttgatgccctgtacaagaggacaggggtggagccaggggcccggcctccagggtttcctgtgctgagcggggatttcttctcctatgcggaccgggaggatcattactggacaggctattacacttcccggcccttctacaagagcttagaccgagtcctggaagcccacctgcggggggcagaggttctgtacagcctggctgcagctcacgctcgccgctctggtctggctggccggtacccactgtctgatttcaccctcctgacggaagctcggcgcacattggggctcttccagcatcacgatgccatcactggcacggccaaggaggctgtggtggtggactatggggtcaggcttctgcgctcccttgtcaacctgaagcaggtcatcattcatgcagcccactatctggtgctgggggacaaggagacctaccactttgaccctgaggcgcccttcctccaagtggatgacactcgcttaagtcacgacgccctcccagagcgcacggtgatccagctggattcctcgcccaggtttgtggtcctattcaacccactggaacaggagcgattcagcatggtgtccctgctggtcaactctccccgcgtgcgtgtcctttcggaggagggtcagcccctggccgtgcagatcagcgcacactggagctctgccaccgaggcggtccctgacgtctaccaggtgtctgtgcctgtccgcctgccagccctgggcctgggcgtgctgcagctacagctgggcctggatgggcaccgcacgctgccctcctctgtgcgcatctacctgcacggccggcagctgtccgtcagcaggcacgaagcgtttcctctccgtgtcattgactctggcaccagcgacttcgccctcagcaaccgctacatgcaggtctggttctcaggccttactgggctcctcaagagcatccgaagggtggatgaggagcacgagcagcaggtggacatgcaggtccttgtctatggcacccgtacgtccaaagacaagagtggagcctacctcttcctgcccgatggcgaggccaagccctacgtccccaaggagccccccgtgctgcgtgtcactgaaggccctttcttctcagaggtggttgcgtactatgagcacattcaccaggcggtccggctttacaatctgccaggggtggaggggctgtctctggacatatcatccctggtggacatccgggactacgtcaacaaggagctggccctgcacatccatacagacatcgacagccagggtatcttcttcacagacctcaatggctttcaggtgcagccccgacggtatctgaagaagctccccctccaggccaacttctaccccatgccagtcatggcctatatccaggacgcacagaagcgcctcacgctgcacactgcccaggccctgggtgtctctagcctcaaagatggccagctggaggtgatcttggaccggcggctgatgcaggatgacaaccggggcctaggccaagggctcaaggacaacaagagaacctgcaaccgtttccgcctcctgctagagcggcgaaccgtgggcagtgaggtccaagatagccactctaccagctacccatccctcctcagccacctgacctccatgtacctgaacgccccggcgctcgctctgcctgtagccaggatgcagctcccaggccctggtctgcgctcatttcatcctctggcttcctcactgccctgtgacttccacctgctcaacctacgtacgctccaggctgaggaggacaccctaccctcggcggagaccgcactcatcttacaccgcaagggttttgactgcggcctggaggccaagaacttgggcttcaactgcaccacaagccaaggcaaggtagccctgggcagccttttccatggcctggatgtggtattccttcagccaacctccttgacgttactgtaccctctggcctccccgtccaacagcactgacgtctatttggagcccatggagattgctacctttcgcctccgcttgggttagggcttcttgtggcctgaagagaaagttcattcacagagactgcctcttaacatgaagatcattggacaagccacacgggtatcccatcccgatctgcctcccagaactgtgacacactgggctctgccctcattttctgtttattgctgctgctgtgttttcggcgcaacccacaaacccagtgatgggtaaatagggcagacgccagtgagatcagggagagaaggcccttggtcagagtgggcagtgccaggctctgctttgggttgtgagtggacacccaactgggcacaggctcaggcacccatcctttttccaaacagggatatagaagtggtggaagcagacagaagaggtaagggaggctaagtgggtaacagcccagcatcagggtcactgtggcaacagcaggctctaggggaatcctgtggttatgtagagactccatgtcctggtgtgatgagcaggatcagagtgactctgggaggacaggggtggggacccagagttagcagtggggatggagcagtagaaggaatcactgtttctcctaggagtctgaaggcctcgctgctttctgtgatggctttgcagtaagtgccgcctggcctgcatgcattggctaacaggctgcagaatggcaggaaggactcgctagagattgtcatggccagagatcataggtcacttcaggtagcaagacccctggcaaactgggcacttggcctatgtactgatttgtgggatggtggcaggggtgtggggtccttcaccctgcctgaattctctttggcttctgtgctctgtatgctgctgtccccaagggctctttcttattatggcagggagtggggattggtcctactttctttctctggaaaggaaagcctccaagactccatgtgcttgggcagcttgagaaggcgttcagcaccacgcctagcaggcagaccttgaagcctcacctttagtctatctgcagaggtattcagttcctggcacaggggactaggggcatgtagagtatatgaggaggcagtatggctgtgcaggagccttcatttcagcttcaattaatagggaagaatttatgatagctctatagatgctgaaaaggtatttcgtaagatttaaaatccatcccttattaaaactcttagtaaattaagtctggaaagaaacaccctaatctagataaaggtctgtttcagaaaccaacagtgatggcattctaaagagtcagacgccacaggcattcccattaaagtcagaaactagccaagggcaagctattattcagcagtgtcccggcactactaacccctgcaacaagccagatgaggaacataaggaagaattataattgtcattatttgtagacaataaaactgcctacctgtaaaacctaagaatcaactgaagacctgttaagagtattctgtaagtcaacccaatgatacacatcatgttcctgtccacatactggttttccccaaatcagctgataaattcagtgtaattccaatgagattgaaactttggaattgacagttctaaagtgcatttgggagagtgaatgtgtgagaacactaagaccactctgaacgatgataatgagttggggggtggactgctcgggggtgatcctgccagattcccagaggattctcacgccaccattacctcactcagtgtgacctggagggggtcagacagacgggagagtccagaaacagacccagggctacaggaatttagtatatggtaagagggatgttttaagtggggaaaaaggtggattatttaataaacagcacttttagacaactagctatcaaagctagatctcagctgggtgcgatggctcacgcctgtaatcccggcactttgggaggccaaggtgggtggatcacttgaggtcaggagttcgagaccagcctggccaagatggcgaaaccctgtgtctactaaaaatacaaaaactagccaggaatggtggcgcgcgcctgtaatcccagttacttaggaggctgaggcaggagaatcacatcaacctgggaggcggaggttgcagtgagcttagatcatgccaccatgccactgcactccagcctgggtgacacagccaaaaaaaaaaccactaagttagatctctacctcacagtgtccatacaaattagttccagagggaagatataccacaaaattactcaaaaatttttatacctctggtgtgggacggtcttttctaaactttaacatgagacttaaaagatataataagggaaaagataagcagatttcgcaaccaaaaaatatcgaaagtctctgtgtgatggaaaacatcaaggttaaaacacaaatgacagatatggaagaaaatatttgcagcacataaaaaaatcaacgagtacaattactttaggagaaaagcttgcttcagggtccttagagaaagtcactggggcctgccaagctgccacctaaagacaagagtgagagggctgagttcttccaggtcatcagagttgttgctgcccgtattaggccacacagtggaaccccatttatatcatagcagaagaaataggattatcaatgtgaactgcttagcatggtgcctggtatatacgagagctccacaaatgtgagctataatcctactagtaaaggatgctaagcagttccactgtggcaggtgtcatttgctagtagaatttgtaatcaaacaataggaggggaatctgtgaacgcctagaaaatgagcagaataaaggatattatctttggaagtcttaaaaaaaaaaa

SEQ ID NO: 91 - DNA, 912 bp, Homo sapiens
  misc_feature (1)..(912): n is a, c, g, or t
antagagaaattactatgagaggatcgcatcaccatcaccatcacggatcctatttaggtgacactatagaatcgtcgacccacgcgtccgcccacgcgtccggaaagtcccactcgccctcggcttctccctgcccggccgccggtgtcccgcccgccgcctccccgcgcagcccggcccgacccgcggcgatggcccagcccggggacccgcggcgcctctgcaggctggtgcaggagggccggctgcgcgccctgaaggaggagctgcaggcggccgggggctgcccggggccggccggggataccctcctgcactgcgccgcgcgccacgggcatcgggacntgctggcctatctggccgangcctggggcatggacatcgaggtcaccaaccgagactacaagcggcctctgcacgaggcggcctccatgggccaccgagactgcgtgcnctacctgctgggccggggggcagcggtcnactgcntgaanaaggccgantggactcctctgatgatggcctgcacaaggaanaacctgggggtgatccaggagctggtggaacatggcgccaatccactcctgaagaacaaagatggctggaacagtttccacattgccagtcgagaaggcnaccctctgatcctccaagtacctgctcantgtttgcccagngtgccctggaatacagagancaaaattagaaggactcctctgnatactgcancaatgcatgnaccatttngaggcantcaaagtgcttctttaagaggtgccnatatgaacnanantacanaaanaattgttggcgtcaccgnnttgatggaactcaattcaattttntncacatcnaantctnntaagnctgntccttnnantaaaaatgnggctttgcntttcananaaaaa

SEQ ID NO: 92 - DNA, 270 bp, Homo sapiens
atgtgcgaccgaaaggccgtgatcaaaaatgcggacatgtcggaagagatgcaacaggactcggtggagtgcgctactcaggcgctggagaaatacaacatagagaaggacattgcggctcatatcaagaaggaatttgacaagaagtacaatcccacctggcattgcatcgtggggaggaacttcggtagttatgtgacacatgaaaccaaacacttcatctacttctacctgggccaagtggccattcttctgttcaaatctggttaa

SEQ ID NO: 93 - DNA, 1686 bp, Homo sapiens
atgtgtggcatttgggcgctgtttggcagtgatgattgcctttctgttcagtgtctgagtgctatgaagattgcacacagaggtccagatgcattccgttttgagaatgtcaatggatacaccaactgctgctttggatttcaccggttggcggtagttgacccgctgtttggaatgcagccaattcgagtgaagaaatatccgtatttgtggctctgttacaatggtgaaatctacaaccataagaagatgcaacagcattttgaatttgaataccagaccaaagtggatggtgagataatccttcatctttatgacaaaggaggaattgagcaaacaatttgtatgttggatggtgtgtttgcatttgttttactggatactgccaataagaaagtgttcctgggtagagatacatatggagtcagacctttgtttaaagcaatgacagaagatggatttttggctgtatgttcagaagctaaaggtcttgttacattgaagcactccgcgactccctttttaaaagtggagccttttcttcctggacactatgaagttttggatttaaagccaaatggcaaagttgcatccgtggaaatggttaaatatcatcactgtcgggatgtacccctgcacgccctctatgacaatgtggagaaactctttccaggttttgagatagaaactgtgaagaacaacctcaggatcctttttaataatgctgtaaagaaacgtttgatgacagacagaaggattggctgccttttatcagggggcttggactccagcttggttgctgccactctgttgaagcagctgaaagaagcccaagtacagtatcctctccagacatttgcaattggcatggaagacagccccgatttactggctgctagaaaggtggcagatcatattggaagtgaacattatgaagtcctttttaactctgaggaaggcattcaggctctggatgaagtcatattttccttggaaacttatgacattacaacagttcgtgcttcagtaggtatgtatttaatttccaagtatattcggaagaacacagatagcgtggtgatcttctctggagaaggatcagatgaacttacgcagggttacatatattttcacaaggctccttctcctgaaaaagccgaggaggagagtgagaggcttctgagggaactctatttgtttgatgttctccgcgcagatcgaactactgctgcccatggtcttgaactgagagtcccatttctagatcatcgattttcttcctattacttgtctctgccaccagaaatgagaattccaaagaatgggatagaaaaacatctcctgagagagacgtttgaggattccaatctgatacccaaagagattctctggcgaccaaaagaagccttcagtgatggaataacttcagttaagaattcctggtttaagattttacaggaatacgttgaacatcaggttgatgatgcaatgatggcaaatgcagcccagaaatttcccttcaatactcctaaaaccaaagaaggatattactaccgtcaagtctttgaacgccattacccaggccgggctgactggctgagccattactggatgcccaagtggatcaatgccactgacccttctgcccgcacgctgacccactacaagtcagctgtcaaagcttag

SEQ ID NO: 94 - DNA, 2034 bp, Homo sapiens
atgggctcgcgctgccgggcgtgggcgtggactcgggcgtgggcactggcggagttccaagcccgggctgaggagggggcggcggcggcggcggcggcggcgggcgggtacccttcgactgggcgttgccgctgttccctgcgcggcatggaggggacggccgtggccgtgttcgagattttgagatttttaataattcactggaagtgtgacatagatgtatcaaagggagcattgctagaagggcagctagtgatttccatagaaggattaaattctaagcaccaggcaaatgctcttcattgtgtaacaactagatggagtctcactctgttacccaggccggagtgcagtggcgcagtctcggctcactgcaacctccacctcccaggttcaagtgattctcatgcctcagtcccccgagtagctgggattacagatgcccaccaccatgcctggctaattatggttgcttctgcaggaagcctttttggtggcatggtcctcaagaagttcctaaaagaaatacagtccatactgcccggaatctctgcaaagctgacttggacttcagaggaaggcagctattctcaggatatgacaggggtaacacccttccagatgatttttgaggttgatgaaaagcccagaaccttgatgacagattgtctggttataaagcattttttacgtaaaatcatcatggtgcaccctaaggtcagatttcatttcagtgtaaaggtaaatggaatcctctccacagagatctttggggtggagaatgaacccactttgaaccttgggaatggaattgctcttttggtcgactcccagcattatgtgagaccaaattttggtacaattgaatcacactgcagcagaattcaccctgtgctaggacatccagtaatgcttttcatccctgaagacgtggctggcatggacttgttgggagaactgatactgactccagcagctgcactgtgccccagcccaaaggtttcttccaaccagcttaacaggatttcttcagtttccatatttctatatggacctttgggtctgcctctgatattgtcaacttgggagcagccgatgactactttcttcaaagatacctcttctttagttgactggaaaaaataccatttgtgtatgatacccaatttggatctcaatttggatagagatttggtgcttccagatgtgagttatcaggtggaatccagtgaggaggatcagtctcagactatggatcctcaaggacaaactctgctgctttttctctttgtggatttccacagtgcatttccagtccagcaaatggaaatctggggagtctatactttgctcacaactcatctcaatgccatccttgtggagagccacagtgtagtgcaaggttccatccaattcactgtggacaaggtcttggagcaacatcaccaggctgccaaggctcagcagaaactacaggcctcactctcagtggctgtgaactccatcatgagtattctgactggaagcactaggagcagcttccgaaagatgtgtctccagacccttcaagcagctgacacacaagagttcaggaccaaactgcacaaagtatttcgtgagatcacccaacaccaatttcttcaccactgctcatgtgaggtgaagcagcagctaaccctagaaaaaaaggactcagcccagggcactgaggacgcacctgataacagcagcctggagctcctagcagataccagcgggcaagcagaaaacaagaggctcaagaggggcagcccccgcatagaggagatgcgagctctgcgctctgccagggccccgagcccgtcagaggccgccccgcgccgcccggaagccaccgcggcccccctcactcctagaggaagggagcaccgcgaggctcacggcagggccctggcgccgggcagggcgagcctcggaagccgcctggaggacgtgctgtggctgcaggaggtctccaacctgtcagagtggctgagtcccagccctgggccctga

SEQ ID NO: 95 - DNA, 762 bp, Homo sapiens
atgggtgagttcaacgagaagaagacaacatgtggcaccgtttgcctcaagtacctgctgtttacctacaattgctgcttctggctggctggcctggctgtcatggcagtgggcatctggacgctggccctcaagagtgactacatcagcctgctggcctcaggcacctacctggccacagcctacatcctggtggtggcgggcactgtcgtcatggtgactggggtcttgggctgctgcgccaccttcaaggagcgtcggaacctgctgcgcctgtacttcatcctgctcctcatcatctttctgctggagatcatcgctggtatcctcgcctacgcctactaccagcagctgaacacggagctcaaggagaacctgaaggacaccatgaccaagcgctaccaccagccgggccatgaggctgtgaccagcgctgtggaccagctgcagcaggagttccactgctgtggcagcaacaactcacaggactggcgagacagtgagtggatccgctcacaggaggccggtggccgtgtggtcccagacagctgctgcaagacggtggtggctctttgtgggcagcgagaccatgcctccaacatctacaaggtggagggcggctgcatcaccaagttggagaccttcatccaggagcacctgagggtcattggggctgtggggatcggcattgcctgtgtgcaggtctttggcatgatcttcacgtgctgcctgtacaggagtctcaagctggagcactactga

SEQ ID NO: 96 - DNA, 879 bp, Homo sapiens
atggagctgctgtgttgcgaaggcacccggcacgcgccccgggccgggccggacccgcggctgctgggggaccagcgtgtcctgcagagcctgctccgcctggaggagcgctacgtaccccgcgcctcctacttccagtgcgtgcagcgggagatcaagccgcacatgcggaagatgctggcttactggatgctggaggtatgtgaggagcagcgctgtgaggaggaagtcttccccctggccatgaactacctggatcgctacctgtcttgcgtccccacccgaaaggcgcagttgcagctcctgggtgcggtctgcatgctgctggcctccaagctgcgcgagaccacgcccctgaccatcgaaaaactgtgcatctacaccgaccacgctgtctctccccgccagttgcgggactgggaggtgctggtcctagggaagctcaagtgggacctggctgctgtgattgcacatgatttcctggccttcattctgcaccggctctctctgccccgtgaccgacaggccttggtcaaaaagcatgcccagacctttttggccctctgtgctacagattatacctttgccatgtacccgccatccatgatcgccacgggcagcattggggctgcagtgcaaggcctgggtgcctgctccatgtccggggatgagctcacagagctgctggcagggatcactggcactgaagtggactgcctgcgggcctgtcaggagcagatcgaagctgcactcagggagagcctcagggaagcctctcagaccagctccagcccagcgcccaaagccccccggggctccagcagccaagggcccagccagaccagcactcctacagatgtcacagccatacacctgtag

SEQ ID NO: 97 - DNA, 2004 bp, Homo sapiens
atggccaaaccagcacagggtgccaagtaccggggctccatccatgacttcccaggctttgaccccaaccaggatgccgaggctctgtacactgccatgaagggctttggcagtgacaaggaggccatactggacataatcacctcacggagcaacaggcagaggcaggaggtctgccagagctacaagtccctctacggcaaggacctcattgctgatttaaagtatgaattgacgggcaagtttgaacggttgattgtgggcctgatgaggccacctgcctattgtgatgccaaagaaattaaagatgccatctcgggcattggcactgatgagaagtgcctcattgagatcttggcttcccggaccaatgagcagatgcaccagctggtggcagcatacaaagatgcctacgagcgggacctggaggctgacatcatcggcgacacctctggccacttccagaagatgcttgtggtcctgctccagggaaccagggaggaggatgacgtagtgagcgaggacctggtacaacaggatgtccaggacctatacgaggcaggggaactgaaatggggaacagatgaagcccagttcatttacatcttgggaaatcgcagcaagcagcatcttcggttggtgttcgatgagtatctgaagaccacagggaagccgattgaagccagcatccgaggggagctgtctggggactttgagaagctaatgctggccgtagtgaagtgtatccggagcaccccggaatattttgctgaaaggctcttcaaggctatgaagggcctggggactcgggacaacaccctgatccgcatcatggtctcccgtagtgagttggacatgctcgacattcgggagatcttccggaccaagtatgagaagtccctctacagcatgatcaagaatgacacctctggcgagtacaagaagactctgctgaagctgtctgggggagatgatgatgctgctggccagttcttcccggaggcagcgcaggtggcctatcagatgtgggaacttagtgcagtggcccgagtagagctgaagggaactgtgcgcccagccaatgacttcaaccctgacgcagatgccaaagcgctgcggaaagccatgaagggactcgggactgacgaagacacaatcatcgatatcatcacgcaccgcagcaatgtccagcggcagcagatccggcagaccttcaagtctcactttggccgggacttaatgactgacctgaagtctgagatctctggagacctggcaaggctgattctggggctcatgatgccaccggcccattacgatgccaagcagttgaagaaggccatggagggagccggcacagatgaaaaggctcttattgaaatcctggccactcggaccaatgctgaaatccgggccatcaatgaggcctataaggaggactatcacaagtccctggaggatgctctgagctcagacacatctggccacttcaggaggatcctcatttctctggccacggggcatcgtgaggagggaggagaaaacctggaccaggcacgggaagatgcccaggaaatagcagacacacctagtggagacaaaacttccttggagacacgtttcatgacgatcctgtgtacccggagctatccgcacctccggagagtcttccaggagttcatcaagatgaccaactatgacgtggagcacaccatcaagaaggagatgtctggggatgtcagggatgcatttgtggccattgttcaaagtgtcaagaacaagcctctcttctttgccgacaaactttacaaatccatgaagggtgctggcacagatgagaagactctgaccaggatcatggtatcccgcagtgagattgacctgctcaacatccggagggaattcattgagaaatatgacaagtctctccaccaagccattgagggtgacacctccggagacttcctgaaggccttgctggctctctgtggtggtgaggactag

SEQ ID NO: 98 - DNA, 1238 bp, Homo sapiens
ttcctcctcagccccgggccggagcggggtgtcggcagcggccggttcgggcggcgactcgcgcttctctgggcggcggcgcttggccatgtcgtgtcggggaaggtaatgagccgcagagccccggggtctcggctgagcagcggcggcaccaactattcgcggagctggaatgactggcaacccagattgacttgatgcaaaacatcacaaaggctccatgttacacagtatgcgatttttgagaactgatagtgcatcagctgacccaggtaatttaaaatattcttcatccagagatagaggtggttcttcctcttacggactgcaaccttcaaattcagctgtggtgtctcggcaaaggcacgatgataccagagtccacgctgacatacagaatgacgaaaagggtggctacagtgtcaatggaggatctggggaaaatacttatggtcggaagtcgttggggcaagagctgagggttaacaatgtgaccagccctgagttcaccagtgttcagcatggcagtcgtgctttagccaccaaagacatgaggaaatcacaggagagatcgatgtcttattgtgatgagtctcgactgtcaaatcttcttcggaggatcacccgggaagacgacagagactgaagattggtcactgtaaagcagttgaaagaatttattcagcaaccagaaaataagctggtactagttaaacaattggataatatcttggctgctgcacatgatgtgcttaatgaaagtagcaaattgcttcaggagttgagacaggagggagcttgctgtcttggccttctttgtgcttctctgagctatgaggctgagaagatcttcaagtggatttttagcaaatttagctcatctgcaaaagatgaagttaaactcctctacttatgtgccacctacaaagcactagagactgtaggagaaaagaaagccttttcatctgtaatgcagcttgtaatgaccagcctgcagtcaattcttgaaaatgtggatacaccagaattgctttgcaaatgtgttaagtgcattcttttggtggctcgatgttaccctcatattttcagcgctaattttagggatacagttgatatattagttggatggcatagagatcatactcagaaaccttcgctcacgcagcaggtatctgggtggttgcagagtttggagccattttgggtagctgatcttgcatttcctacgactcttcttg

SEQ ID NO: 99 - DNA, 1992 bp, Homo sapiens
atgattgagaagatgcagggaagcaggatggatgaacaacgctgctccttcccgccgcccctcaaaacagaggaggactacattccatacccgagcgtgcacgaggtcttggggcgagaaggacccttccccctcatcctgctgccccagtttgggggctactggattgagggcaccaaccacgaaatcaccagcatccccgagacagagccactgcagtcgcccacaaccaaggtgaagctcgagtgcaaccccacagcccgcatctaccggaagcactttctcggcaaggagcatttcaattactactcactggacgctgccctcggccaccttgtcttctcactcaagtacgatgtcatcggggaccaagagcacctgcggctgctgctcaggaccaagtgccggacataccatgatgtcatccccatctcctgcctcaccgagttccctaatgttgtccagatggcaaagttggtgtgtgaagacgtcaatgtggatcggttctatcctgtgctctaccccaaggcttcccggctcatcgtcacctttgacgagcatgtcatcagcaataacttcaagtttggcgtcatttatcagaagcttgggcagacctccgaggaagaactcttcagcaccaatgaggaaagtcccgctttcgtggagttccttgaatttcttggccagaaggtcaaactgcaggactttaaggggttccgaggaggcctggacgtgacccacgggcagacggggaccgaatctgtgtactgcaacttccgcaacaaggagatcatgtttcacgtgtccaccaagctgccatacacggaaggggacgcccagcagttgcagcggaagcggcacatcgggaacgacatcgtggctgtggtcttccaggatgagaacactcctttcgtgcccgacatgatcgcgtccaacttcctgcatgcctacgtcgtggtgcaggctgagggcgggggccctgatggccccctctacaaggtctctgtcactgcaagagatgatgtgcccttctttggaccccccctcccggaccccgctgtgttcaggaaggggcctgagttccaggaatttttgctgacaaagctgatcaatgctgaatatgcctgctacaaggcagagaagtttgccaaactggaggagcggacgcgggccgccctcctggagacgctctatgaggaactacacatccacagccagtccatgatgggcttgggcggcgacgaggacaagatggagaatggcagtgggggcggcggcttctttgagtctttcaagcgggtcatccggagccgcagccagtccatggatgccatggggctgagcaacaagaagcccaacaccgtgtccaccagccacagcgggagcttcgcgcccaacaaccccgacctggccaaggcggctggaatatcactgattgtccctgggaagagccccacgaggaagaagtcgggcccgttcggctcccgccgcagcagcgccattggcatcgagaacatacaggaggtgcaggagaagagggagagccctccggctggtcagaagaccccagacagcgggcacgtctcacaggagcccaagtcggagaactcatccactcagagctccccagagatgcccacgaccaagaacagagcggagaccgcagcgcagagagcagaggcgctcaaggacttctcccgctcctcgtccagtgccagcagcttcgccagcgtggtggaggagacggagggtgtggacggagaggacacaggcctggagagcgtgtcatcctcaggaacaccccacaagcgggactccttcatctatagcacgtggctggaggacagtgtcagcaccactagtgggggcagctccccaggcccctctcgatcaccccacccagacgccggcaagttgggggaccctgcgtgtcccgagatcaagatccagctggaagcatctgagcagcacatgccccagctgggctgttag

SEQ ID NO: 100 - DNA, 2589 bp, Homo sapiens
atgcggctggcgctgctctgggccctggggctcctgggcgcgggcagccctctgccttcctggccgctcccaaatataggtggcactgaggagcagcaggcagagtcagagaaggccccgagggagcccttggagccccaggtccttcaggacgatctcccaattagcctcaaaaaggtgcttcagaccagtctgcctgagcccctgaggatcaagttggagctggacggtgacagtcatatcctggagctgctacagaatagggagttggtcccaggccgcccaaccctggtgtggtaccagcccgatggcactcgggtggtcagtgagggacacactttggagaactgctgctaccagggaagagtgcggggatatgcaggctcctgggtgtccatctgcacctgctctgggctcagaggcttggtggtcctgaccccagagagaagctataccctggagcaggggcctggggaccttcagggtcctcccattatttcgcgaatccaagatctccacctgccaggccacacctgtgccctgagctggcgggaatctgtacacactcagaagccaccagagcaccccctgggacagcgccacattcgccggaggcgggatgtggtaacagagaccaagactgtggagttggtgattgtggctgatcactcggaggcccagaaataccgggacttccagcacctgctaaaccgcacactggaagtggccctcttgctggacacattcttccggcccctgaatgtacgagtggcactagtgggcctggaggcctggacccagcgtgacctggtggagatcagcccaaacccagctgtcaccctcgaaaacttcctccactggcgcagggcacatttgctgcctcgattgccccatgacagtgcccagctggtgactggtacttcattctctgggcctacggtgggcatggccattcagaactccatctgttctcctgacttctcaggaggtgtgaacatggaccactccaccagcatcctgggagtcgcctcctccatagcccatgagttgggccacagcctgggcctggaccatgatttgcctgggaatagctgcccctgtccaggtccagccccagccaagacctgcatcatggaggcctccacagacttcctaccaggcctgaacttcagcaactgcagccgacgggccctggagaaagccctcctggatggaatgggcagctgcctcttcgaacggctgcctagcctaccccctatggctgctttctgcggaaatatgtttgtggagccgggcgagcagtgtgactgtggcttcctggatgactgcgtcgatccctgctgtgattctttgacctgccagctgaggccaggtgcacagtgtgcatctgacggaccctgttgtcaaaattgccagctgcgcccgtctggctggcagtgtcgtcctaccagaggggattgtgacttgcctgaattctgcccaggagacagctcccagtgtccccctgatgtcagcctaggggatggcgagccctgcgctggcgggcaagctgtgtgcatgcacgggcgttgtgcctcctatgcccagcagtgccagtcactttggggacctggagcccagcccgctgcgccactttgcctccagacagctaatactcggggaaatgcttttgggagctgtgggcgcaaccccagtggcagttatgtgtcctgcacccctagagatgccatttgtgggcagctccagtgccagacaggtaggacccagcctctgctgggctccatccgggatctactctgggagacaatagatgtgaatgggactgagctgaactgcagctgggtgcacctggacctgggcagtgatgtggcccagcccctcctgactctgcctggcacagcctgtggccctggcctggtgtgtatagaccatcgatgccagcgtgtggatctcctgggggcacaggaatgtcgaagcaaatgccatggacatggggtctgtgacagcaacaggcactgctactgtgaggagggctgggcaccccctgactgcaccactcagctcaaagcaaccagctccctgaccacagggctgctcctcagcctcctggtcttattggtcctggtgatgcttggtgccagctactggtaccgtgcccgcctgcaccagcgactctgccagctcaagggacccacctgccagtacagggcagcccaatctggtccctctgaacggccaggacctccgcagagggccctgctggcacgaggcactaaggctagtgctctcagcttcccggcccccccttccaggccgctgccgcctgaccctgtgtccaagagactccaggctgagctggctgaccgacccaatccccctacccgccctctgcccgctgacccggtggtgagaagcccgaagtctcaggggccagccaagcccccacccccaaggaagccactgcctgccgacccccagggccggtgcccatcgggtgacctgcccggcccaggggctggaatcccgcccctagtggtaccctccagaccagcgccaccgcctccgacagtgtcctcgctctacctctga

SEQ ID NO: 101 - DNA, 429 bp, Homo sapiens
atgatccgctttatcctcatccagaaccgggcaggcaagacgcgcctggccaagtggtacatgcagtttgatgatgatgagaaacagaagctgatcgaggaggtgcatgccgtggtcaccgtccgagacgccaaacacaccaactttgtggagttccggaactttaagatcatttaccgccgctatgctggcctctacttctgcatctgtgtggatgtcaatgacaacaacctggcttacctggaggccattcacaacttcgtggaggtcttaaacgaatatttccacaatgtctgtgaactggacctggtgttcaacttctacaaggtttacacggtcgtggacgagatgttcctggctggcgaaatccgagagaccagccagacgaaggtgctgaaacagctgctgatgctacagtccctggagtga

SEQ ID NO: 102 - DNA, 753 bp, Homo sapiens
atggctgtgtgcggcctggggagccgtcttggcctggggagccgtcttggcctgcgcgggtgcttcggcgccgccaggctcctgtatccccgtttccagagccgcggccctcagggcgtggaagacggggacaggccacagccttcctcgaagacacccaggatccccaagatttacaccaaaacgggagacaaagggttttctagtaccttcacaggagaaaggagacccaaagatgaccaagtgtttgaagccgtgggaactacagatgaattaagttcagctattgggtttgctctggaattagtcacagaaaagggccatacatttgccgaagagcttcagaaaatccagtgcacattgcaggacgtcggctcggccctggcgacaccatgctcctcggcccgggaggctcacttaaagtataccacgttcaaggcggggcccatcctggagctggagcagtggatcgacaagtacaccagccagctcccaccactcacggccttcatcctgccttcgggaggcaagatcagctcggcgctgcatttctgccgggccgtgtgccgccgggccgagagacgtgtggtgcctcttgtccagatgggagagaccgatgcgaacgtggccaagttcttaaacagactcagtgactatctcttcacgctagccagatatgcagccatgaaggaggggaatcaagagaaaatatacatgaaaaatgacccatcggccgagtctgagggactctga

SEQ ID NO: 103 - DNA, 2052 bp, Homo sapiens
atggcactgtcaaagagggagctggatgagctgaaaccatggatagagaagacagtgaagagggtcctgggtttctcagagcctacggtggtcacagcagcattgaactgtgtggggaagggcatggacaagaagaaggcagccgatcatctgaaaccttttcttgatgattctactctccgatttgtggacaaactgtttgaggctgtggaggaaggccgaagctctaggcattccaagtctagcagtgacaggagcagaaaacgagagctaaaggaggtgtttggtgatgactctgagatctctaaagaatcatcaggagtaaagaagcgacgaataccccgttttgaggaggtggaagaagagccagaggtgatccctgggcctccatcagagagccctggcatgctgactaagctccagatcaaacagatgatggaggcagcaacacgacaaatcgaggagaggaaaaaacagctgagcttcattagcccccctacacctcagccaaagactccttcttcctcccaaccagaacgacttcctattggcaacactattcagccctcccaggctgccactttcatgaatgatgccattgagaaggcaaggaaagcagctgaactgcaagctcgaatccaagcccagctggcactgaagccaggactcatcggcaatgccaacatggtgggcctggctaatctccatgccatgggcattgctcccccgaaggtggagttaaaagaccaaacgaaacctacaccactgatcctggatgagcaagggcgcactgtagatgcaacaggcaaggagattgagctgacacaccgcatgcctactctgaaagccaatattcgtgctgtgaagagggaacaattcaagcaacaactaaaggaaaagccatcagaagacatggaatccaataccttttttgacccccgagtctccattgccccttcccagcgccagagacgcacttttaaattccatgacaagggcaaatttgagaagattgctcagcgattacggacaaaggctcaactggagaagctacaggcagagatttcacaagcagctcgaaaaacaggcatccatacttcgactaggcttgccctcattgctcctaagaaggagctaaaggaaggagatattcctgaaattgagtggtgggactcttacataatccccaatggctttgatcttacagaggaaaatcccaagagagaagattattttggaatcacaaatcttgttgaacatccagcccagctcaatcctccagttgacaatgacacaccagttactctgggagtatatcttaccaagaaggaacagaaaaaacttcggagacaaacaaggagggaagcacagaaggaactacaagaaaaagtcaggctgggcctgatgcctcctccagaacccaaagtgagaatttctaatttgatgcgagtattaggaacagaagctgttcaagaccccacgaaggtagaagcccacgtcagagctcagatggcaaaaagacagaaagcgcatgaagaggccaacgctgcccgaaaactcacagcagaacagagaaaggtcaagaaaattaaaaagcttaaagaagacatttcacagggggtacacatatctgtatatagagttcgaaatttgagcaacccagccaagaagttcaagattgaagccaatgctgggcaactgtacctgacaggggtggtggtactgcacaaggatgtcaacgtggtagtagtggaagggggccccaaggcccagaagaaatttaagcgtcttatgctgcatcggataaagtgggatgaacagacatctaacacaaagggagatgatgatgaggagtctgatgaggaagctgtgaagaaaaccaacaaatgtgtactagtctgggagggtacagccaaagaccggagctttggagagatgaagtttaaacagtgtcctacagagaacatggctcgtgagcatttcaaaaagcatggggctgaacactactgggaccttgcgctgagtgaatctgtgttagagtccactgattga

SEQ ID NO: 104 - DNA, 1935 bp, Homo sapiens
atggaggccgagcggggtcccgagcgccggcctgcggagcgtagcagcccgggccagacgccggaggagggcgcgcaggccttggccgagttcgcggcgctgcacggcccggcgctgcgcgcttcgggggtccccgaacgttactggggccgcctcctgcacaagctggagcacgaggttttcgacgctggggaagtgtttgggatcatgcaagtggaggaggtagaagaggaggaggacgaggcagcccgggaggtgcggaagcagcagcccaacccggggaacgagctgtgctacaaggtcatcgtgaccagggagagcgggctccaggcagcccaccccaacagcatcttcctcatcgaccacgcctggacgtgccgtgtggagcacgcgcgccagcagctgcagcaggtgcccgggctgctgcaccgcatggccaacctgatgggcattgagttccacggtgagctgcccagtacagaggctgtggccctggtgctggaggagatgtggaagttcaaccagacctaccagctggcccatgggacagctgaggagaagatgccggtgtggtatatcatggacgagttcggttcgcggatccagcacgcggacgtgcccagcttcgccacggcacccttcttctacatgccgcagcaggtggcctacacgctgctgtggcccctgagggacctggacactggcgaggaggtgacccgagactttgcctacggagagacggaccccctgatccggaagtgcatgctgctgccctgggcccccaccgacatgctggacctcagctcttgcacacccgagccgcccgccgagcactaccaggccattctggaggaaaacaaggagaagctgccacttgacatcaaccccgtggtgcacccccacggccacatcttcaaggtctacacggacgtgcagcaggtggccagcagcctcacccacccgcgcttcaccctcacccagagtgaggcggacgccgacatcctcttcaacttctcacacttcaaggactacaggaaactcagccaggagaggccaggcgtgctgctgaaccagttcccctgcgagaacctgctgactgtcaaggactgcctggcctccatcgcgcgccgggcaggtggccccgagggcccaccctggctgccccgaaccttcaacctgcgcactgagctgccccagtttgtcagctacttccagcagcgggaaaggtggggcgaggacaaccactggatctgcaagccctggaacctggcgcgcagcctggacacccacgtcaccaagagcctgcacagcatcatccggcaccgagagagcacccccaaggttgtgtccaagtacatcgaaagtcccgtgttgttccttcgagaagacgtgggaaaggtcaagttcgacatccgctacatcgtgctgctgcggtcagtgaggcccctacggttgttcgtgtatgatgtgttctggctgcggttctccaaccgggcctttgcactcaacgacctggatgactacgagaagcacttcacggtcatgaactatgacccggatgtggtgctgaagcaggtgcactgtgaagagttcatccccgagtttgagaagcaatacccagaatttccctggacggacgtccaggctgagatcttccgggccttcacggagctgttccaggtggcctgtgccaagccaccacccctgggcctctgcgactacccctcatcccgggccatgtatgccgtcgacctcatgctgaagtgggacaacggcccagatggaaggcgggtgatgcagccgcagatcctggaggtgaacttcaaccccgactgtgagcgagcctgcaggtaccaccccaccttcttcaacgacgtcttcagcaccttgtttctggaccagcccggtggctgccacgttacctgccttgtctag

SEQ ID NO: 105 - DNA, 2718 bp, Homo sapiens
atggcaaaaagagccctgcatgattttattgacaagtatctctatgccatgcggctctccgatgaaactctcatagatatcatgactcgcttcaggaaggagatgaagaatggcctctcccgggattttaatccaacagccacagtcaagatgttgccaacattcgtaaggtccattcctgatggctctgaaaagggagatttcattgccctggatcttggtgggtcttcctttcgaattctgcgggtgcaagtgaatcatgagaaaaaccagaatgttcacatggagtccgaggtttatgacaccccagagaacatcgtgcacggcagtggaagccagctttttgatcatgttgctgagtgcctgggagatttcatggagaaaaggaagatcaaggacaagaagttacctgtgggattcacgttttcttttccttgccaacaatccaaaatagatgaggccatcctgatcacctggacaaagcgatttaaagcgagcggagtggaaggagcagatgtggtcaaactgcttaacaaagccatcaaaaagcgaggggactatgatgccaacatcgtagctgtggtgaatgacacagtgggcaccatgatgacctgtggctatgacgaccagcactgtgaagtcggcctgatcatcggcactggcaccaatgcttgctacatggaggaactgaggcacattgatctggtggaaggagacgaggggaggatgtgtatcaatacagaatggggagcctttggagacgatggatcattagaagacatccggacagagtttgacagggagatagaccggggatccctcaaccctggaaaacagctgtttgagaagatggtcagtggcatgtacttgggagagctggttcgactgatcctagtcaagatggccaaggagggcctcttatttgaagggcggatcaccccggagctgctcacccgagggaagtttaacaccagtgatgtgtcagccatcgaaaagaataaggaaggcctccacaatgccaaagaaatcctgacccgcctgggagtggagccgtccgatgatgactgtgtctcagtccagcacgtttgcaccattgtctcatttcgctcagccaacttggtggctgccacactgggcgccatcttgaaccgcctgcgtgataacaagggcacacccaggctgcggaccacggttggtgtcgacggatctctttacaagacgcacccacagtattcccggcgtttccacaagactctaaggcgcttggtgccagactccgatgtgcgcttcctcctctcggagagtggcagcggcaagggggctgccatggtgacggcggtggcctaccgcttggccgagcagcaccggcagatagaggagaccctggctcatttccacctcaccaaggacatgctgctggaggtgaagaagaggatgcgggccgagatggagctggggctgaggaagcagacgcacaacaatgccgtggttaagatgctgccctccttcgtccggagaactcccgacgggaccgagaatggtgacttcttggccctggatcttggaggaaccaatttccgtgtgctgctggtgaaaatccgtagtgggaaaaagagaacggtggaaatgcacaacaagatctacgccattcctattgaaatcatgcagggcactggggaagagctgtttgatcacattgtctcctgcatctctgacttcttggactacatggggatcaaaggccccaggatgcctctgggcttcacgttctcatttccctgccagcagacgagtctggacgcgggaatcttgatcacgtggacaaagggttttaaggcaacagactgcgtgggccacgatgtagtcaccttactaagggatgcgataaaaaggagagaggaatttgacctggacgtggtggctgtggtcaacgacacagtgggcaccatgatgacctgtgcttatgaggagcccacctgtgaggttggactcattgttgggaccggcagcaatgcctgctacatggaggagatgaagaacgtggagatggtggagggggaccaggggcagatgtgcatcaacatggagtggggggcctttggggacaacgggtgtctggatgatatcaggacacactacgacagactggtggacgaatattccctaaatgctgggaaacaaaggtatgagaagatgatcagtggtatgtacctgggtgaaatcgtccgcaacatcttaatcgacttcaccaagaagggattcctcttccgagggcagatctctgagacgctgaagacccggggcatctttgagaccaagtttctctctcagatcgagagtgaccgattagcactgctccaggtccgggctatcctccagcagctaggtctgaatagcacctgcgatgacagtatcctcgtcaagacagtgtgcggggtggtgtccaggagggccgcacagctgtgtggcgcaggcatggctgcggttgtggataagatccgcgagaacagaggactggaccgtctgaatgtgactgtgggagtggacgggacactctacaagcttcatccacacttctccagaatcatgcaccagacggtgaaggaactgtcaccaaaatgtaacgtgtccttcctcctgtctgaggatggcagcggcaagggggccgccctcatcacggccgtgggcgtgcggttacgcacagaggcaagcagctaa

SEQ ID NO: 106 - DNA, 1641 bp, Homo sapiens
atggagcagcgccgcgtcaccgacttcttcgcgcgccgccgccccgggcccccccgcatcgcgccgcccaagctggcctgccgcacccccagccccgccaggcccgcactccgcgccccggcctccgctaccagtggcagccgcaagcgcgcccgcccgcccgccgcccccggacgcgaccaggccaggccaccggcccgcaggagactgcggctgtcggtggacgaggtttccagccccagtacccccgaggccccagacatcccagcctgcccttctccgggccagaagataaagaaatccaccccggcagcaggtcagccgccccacctgacatccgcgcaggaccaggacaccatctctgagcttgcgtcatgcctgcaacgggcccgggagctgggggcaagagtccgggcgctgaaggccagtgcccaggatgctggggagtcctgcaccccagaggccgagggccgccctgaggagccatgtggcgagaaggcgcccgcctaccagcgcttccatgccctggcccagcccggcctgccgggactcgtgctgccctacaagtaccaggtgctggcggagatgttccgcagcatggacaccatcgtgggcatgctccacaaccgctccgagacgcccacctttgccaaggtccagcggggcgtccaggacatgatgcgtaggcgttttgaggagtgcaatgttggccagatcaaaaccgtgtacccggcctcctaccgcttccgccaggagcgcagtgtccccaccttcaaggatggcaccaggaggtcagattaccagctcaccatcgagccactgctggagcaggaggctgacggagcagccccccagctcacggcctcgcgcctcctgcagcgacggcagatcttcagccagaagctggtggagcatgtcaaggagcaccacaaggccttcctggcctccctgagccccgccatggtggtgccggaggaccagctgacccgctggcacccgcgcttcaacgtggatgaagtacccgacatcgagccggccgcgctgccccagccacccgccacggagaagctcaccactgctcaggaggtgctggcccgggcccgcaacctgatttcacccaggatggagaaggccttgagtcaattggccctgcgctctgctgcgcccagcagccccgggtctcccaggccagcactgccggctaccccaccagccaccccgcctgcagcctctcccagtgctctgaagggggtgtcccaggatctgctggagcggatccgagccaaggaggcacagaagcagctggcacagatgacgcggtgcccggagcaggagcagcggctgcagcgcttagaacggctgcctgagctggcccgcgtgctgcggagcgtctttgtgtccgaacgcaagcctgcgctcagcatggaggtggcctgtgccaggatggtgggcagctgttgtactatcatgagccctggggaaatggagaagcacctgctgctcctctccgagctgctgccggactggctcagcctccaccgcatccgcaccgacacctacgtcaagctggacaaggccgcggacctcgcccacatcactgcacgcctggcccaccagacacgtgctgaggaggggctgtga

SEQ ID NO: 107 - DNA, 1524 bp, Homo sapiens
atggcgggtgcgggcccgaagcggcgcgcgctagcggcgccggcggccgaggagaaggaagaggcgcgggagaagatgctggccgccaagagcgcggacggctcggcgccggcaggcgagggcgagggcgtgaccctgcagcggaacatcacgctgctcaacggcgtggccatcatcgtggggaccattatcggctcgggcatcttcgtgacgcccacgggcgtgctcaaggaggcaggctcgccggggctggcgctggtggtgtgggccgcgtgcggcgtcttctccatcgtgggcgcgctctgctacgcggagctcggcaccaccatctccaaatcgggcggcgactacgcctacatgctggaggtctacggctcgctgcccgccttcctcaagctctggatcgagctgctcatcatccggccttcatcgcagtacatcgtggccctggtcttcgccacctacctgctcaagccgctcttccccacctgcccggtgcccgaggaggcagccaagctcgtggcctgcctctgcgtgctgctgctcacggccgtgaactgctacagcgtgaaggccgccacccgggtccaggatgcctttgccgccgccaagctcctggccctggccctgatcatcctgctgggcttcgtccagatcgggaagggtgatgtgtccaatctagatcccaacttctcatttgaaggcaccaaactggatgtggggaacattgtgctggcattatacagcggcctctttgcctatggaggatggaattacttgaatttcgtcacagaggaaatgatcaacccctacagaaacctgcccctggccatcatcatctccctgcccatcgtgacgctggtgtacgtgctgaccaacctggcctacttcaccaccctgtccaccgagcagatgctgtcgtccgaggccgtggccgtggacttcgggaactatcacctgggcgtcatgtcctggatcatccccgtcttcgtgggcctgtcctgcttcggctccgtcaatgggtccctgttcacatcctccaggctcttcttcgtggggtcccgggaaggccacctgccctccatcctctccatgatccacccacagctcctcacccccgtgccgtccctcgtgttcacgtgtgtgatgacgctgctctacgccttctccaaggacatcttctccgtcatcaacttcttcagcttcttcaactggctctgcgtggccctggccatcatcggcatgatctggctgcgccacagaaagcctgagcttgagcggcccatcaaggtgaacctggccctgcctgtgttcttcatcctggcctgcctcttcctgatcgccgtctccttctggaagacacccgtggagtgtggcatcggcttcaccatcatcctcagcgggctgcccgtctacttcttcggggtctggtggaaaaacaagcccaagtggctcctccagggcatcttctccacgaccgtcctgtgtcagaagctcatgcaggtggtcccccaggagacatag

SEQ ID NO: 108 - DNA, 783 bp, Homo sapiens
atggcggggtcgccgctgctctgggggccgcgggccgggggcgtcggccttttggtgctgctgctgctcggcctgtttcggccgccccccgcgctctgcgcgcggccggtaaaggagccccgcggcctaagcgcagcgtctccgcccttggctgagactggcgctcctcgccgcttccggcggtcagtgccccgaggtgaggcggcgggggcggtgcaggagctggcgcgggcgctggcgcatctgctggaggccgaacgtcaggagcgggcgcgggccgaggcgcaggaggctgaggatcagcaggcgcgcgtcctggcgcagctgctgcgcgtctggggcgccccccgcaactctgatccggctctgggcctggacgacgaccccgacgcgcctgcagcgcagctcgctcgcgctctgctccgcgcccgccttgaccctgccgccctcgcagcccagcttgtccccgcgcccgtccccgccgcggcgctccgaccccggcccccggtctacgacgacggccccgcgggcccggatgctgaggaggcaggcgacgagacacccgacgtggaccccgagctgttgaggtacttgctgggacggattcttgcgggaagcgcggactccgagggggtggcagccccgcgccgcctccgccgtgccgccgaccacgatgtgggctctgagctgccccctgagggcgtgctgggggcgctgctgcgtgtgaaacgcctagagaccccggcgccccaggtgcctgcacgccgcctcttgccaccctga

SEQ ID NO: 109 - DNA, 5901 bp, Homo sapiens
aaaggcgcggcggggaggggagccggggccccagccctgccgggaaacgggttcccagtcccggccgagagcgcgggcgccgaggggaccgacccggactccccgcaaccccccaaccgccaggccatggcgcccacggggctcctggtggccggcgcctccttcctcgcgttccgggggctgcactgggggttgcggcggctgcccacgccggaatcggccgctcgggaccgctggcagtggtggaacctctgcgtctccctggcgcacagcctgctctcggggaccggggcgctgctcggcctgtcactgtaccctcagatggccgccgaccccatccatggccacccgcgctgggctctggtgctggtggctgtgtctgtgggttacttcctggcagacggagctgacctgctgtggaaccagaccttgggcaagacctgggatcttctctgtcatcatttggtggtggtgagctgcctcagcaccgctgttctgtctggccactacgtgggcttctccatggtgtctctgctcctggaactgaactctgcctgcttgcacctgcggaagctgctgttgctttctcgccaggccccatccctggccttcagcgtgaccagctgggcctccttggccaccttggccctcttccgcctggtcccgctggggtggatgagtctgtggctgttccggcagcaccaccaggttcctcttgctctggtcaccctgggtggaattgggctggtcactgtgggcatcatgagcatcatattggggatccgtattctggtcaatgatgtcctacagtctcgaccccatccacccagccctggccatgagaaaaccagggggaccaggacacgtcgtgacaatggacctgtcaccagcaacagttcgactctcagcctgaaagactagagagaagccatgggcccctcgctgggggaggtggggccaggacaaggagatgagggtcttccatgcacagtcccccatcagggtgagggccagacttgctcatcagaatctcagtttctcttccagctaactcacatcccttccccttcctcggatctaagaagaaatgctgatgttggatgggtgggaacctgggtttctgttcactgaaatccgtcatcagatgagcatcctttccagcaaataaactcaagaggtacagctagagctatcagtaaagggtggcaggaggcatgcagctggaagaaactgccagtggagacagaagctctttgctttaacccagggacagatgggggaaggtgaagtcccactaggatcagagagatctggtatggggcgggtggggacagagagaaaagagatctcacctataaccaaattctggcagtgggaggaaggtagaggaggtgctatctgtagcagcagagatggacgtgatagttgccaagagacagaacctgggccacagcaattgctgctgatgtttctggttctcaaagccacactcctgtttttctttttctttttctttttttttatgagacggaatcttactctgtcacccaggctggagtgtagtggcacgatttcggctcactgcaacctcagcctcctgggttcaagtgattgtcctgccttagcctcccgagtagctgtgacttcaggcatgcaccaccaagcccagctaatttttgtattttttggtggagaggaggtttcaccatgttgcccaggctggtctcgaactcctgacctcaagtaatccacctgcctcggcctcccagagtgctgggattacagacgtgagaacaggcgcacactcctgtttttctccttaaccctggtcctgctgtgtctagccttttatttttatttttatttttagtatcttttgacttttcttttttcttttctttttttttttttttttttgagacaagttcttgctctgttgcccaggatggagtgcagtggcttgatcttggctcactgcaatctctgcctcccaggctcaagcaattctcctgcctcccacctcagcctcccaagtagctgggactacaggtgcacgccactgcaccaggctaatttttgtatttttttgtagagaccaggttttgccatgttgcccaggctggtctcaaacttttgcactcaagtgatccacccacctcagcctcccaaagtgctgggattacagacgtgagccaccgtacccgaccccttttgacttttcaaagacaattcggattcttagaggaatgaacacagggctggtttgtcttcttaggacggcactgaagtctagaattacagaaggaaaggtgcccagtacagagttttcccaggcccaggctttcatggaagaacaagggcagaggtagactgtgtgagagaaggctgcaggaggataaaggaatagctggccctctggctgggcgcagcagctcacgcctgtaatcccagcactttgggaggccgaggcgggaggatcacctgaggtcaggagttcaagaccagcctggtcaacatggtgaaaccctgtctctactaaaaatacaaaattagccgggcatggtggtgcatgcctgtaatcccagctactcaggaggctgaggcaggagaatcgcttgaacccaggaggcagaggttgcagtgagccgaggtcgtgccactgcactccagcctgggcaaacagagtgagactcttgtctctaaagaaaaaaaaaaaaggaagagctgggacttttctgagatacattcataaagtcttcttcctccctgctgcttctgctgcgtttttttctgttgaacaagaccccttccttcccagaacatcgaggtgacgggaagtgcccagcagattaagtctgctgttccactaaacaatggactgagagaggcaacccttagccatccacagaaaagctacatgagcaaaagcaagagacaggaagattgtcttcaaaaaaaaacaaaacaaaacaaaaaccttgctaagaagcggaggtacagaaagatacgaagaatgacagagacagacatacatagattgagtgatagatagaaagagagaaggattattcacatagaggtgacagaggcaaagaaggatggagggcaaaagagacaggccctagcagaaatatggagaaaggctgtcatagatcctgagagacaccaaagtcacagaactgataaaagggttataaacaaaaaggaccagaaaaatagaaatgaaggccgacaagaagagaccccaaggctgaaaggcacagagagtctagacagtgaaatagagtgagtgacaaggagaaacacccaggctcaggagtgatggaggaaatactggcagatagagagatcagaagagcaagaggagaggtgggaacagagaagagcggggacgagtccggggagctgagaagcagaaggcggaggaggcagtcagtgggaagattcactgacagaagagaccaggagatatggggacttggaggcaggcagaaagacaaaggacaaacagctgcagcgcaaaccctaaagacaggctgacagtaaccggtcggcagagactggtaggaagataaggacaagtcagaatcaggggtgtcaactgagatgcaaatataggcaaaggagctgacaaagagaatcacagagagaaaaaaaaggaggagagcacagaacaatttaaatatccaggctgggcatggtgggtcacgcctgtaatcccagcattttgggaggccgaggcaggcggatcacgaggtcaggagatgaccatcctggctaacatggtgaaacaccatctctactaaaaatacaaaaaattggccgggcgtggtggcaggcgcccgtaatcccggctactgaggaggctgaggcaggagaatcgtttgaacctgggaggccgaggttgttataatgagccgagatagtgccactgcagtccagcaggggtgacagagtgagactccgtctcaaaaaaaaaaattgaatatccaaagaacaaagaagaggcaggaacccagaaatgaaaagaggaggaaaaatacaggtgtgaaaaaaaaatgagagggattgtgagaagtctccatcatagagtcataaaaacaggcgcaaaggatgaaaatacatcgagactgaggaaaacacagttggaaggagctaaacacaagcagaaaataagagcagagcatttaaatgtaattagataaaaacccaagaggcaaaggtatagatagtgagctagagaaacaatgcagaattttgtcagagtctgtacttctagaagtcatgtttgctggctgggcatggtggctcacgcctgtaatcccagcactttgggaggccgaggtaggaggagtggttgagctcaggagttcaagaccagtctgggcaacatattgagacctcctctctacaaaaaaaaaaaattttcttttttctttcttttcttctttttttttttttttttttgagacagtttcattcttgctgcccaggctggaatgcagtggcacaatcttggctcactgcaacctccacctcctggactcaagtgattctcctgcctcagcctccctagtagctgggattacaggtacccaccaccacactcggctaatttttgtgtttttagtagagacaggatttcaccatattggccaggctggtctcaaactcctgacctcaggtgatccgcccaccttgggctcccaaactactgggattatatgcgtgagccaacacacccggccaaaaaaaaatttttaattaaaaaaaaaagtcatatctgcaaaactcaatttgccatcttaactgaatgccttgattaacaaaaatgttgtctgccttgagtttttaaagaaaaagaaatatgacaaactcatgtgaggaatctattccttaaatatctgttgaggttgatatgaattgattctaagtcatacaccttttctttggccactggtatacattcatgatggtttgagtgagtgtcccttttggtaatacttgatagtgtctatgaggccgggcgtggtggctcacgcctgtaatcccagcactttgggggaccgaggcaggtgaaatcccatctctactaaaaataaaaaaaattagccgggcgtggtggcgggcgcctgtagtcccagctactcaggaggctgaggcaggagaatggcatgaacccgggaggcggagcttgcagtgagccaagatcgtgccactgcactccagcctgggtgacagagcaagactccgtcttaaaaaataaataaataaataaatagacagatagatagatagatagtgtctatgaaggctgcccaagaacttgaccattagggaaacatggctgtttctgtggattaactagtcaagcccatacaggaagagtgaggtcagctcccaggtggggcaggatgtagtggacgcttggaagaatttgggaccacacacgaattgctaccatggtgagccagtgaaacttgaggaaggcaggactggattgtgattacaactgagtaagtaggcagagaattggagtgtgggcaacataaagatgatgtgaatcaaagaagaatggtcaattaagaccctaaaaaaaggacgttcaaaaatgcagaggttaaaaaaaaaaaaagcagagattgccagatgctccatttggtaggagtctgcttagcacagtggtgcttcgccagactttaccgtggcccagggaaatggtcctcaagacggactccatgtctaccaagctacttgctaatgatttctttgtcctccaggacagggaaggggcttttctggatgggatacattgatattttatggccttgaaacactatcctgattataaattaataaattgctatgcaaataattgcattagttgcatcaatctcttat

SEQ ID NO: 110 - DNA, 1617 bp, Homo sapiens
atggcccgggccgctgccctcctgccgtcgagatcgccgccgacgccgctgctgtggccgctgctgctgctgctgctcctggaaaccggagcccaggatgtgcgagttcaagtgctacccgaggtgcgaggccagctcgggggcaccgtggagctgccgtgccacctgctgccacctgttcctggactgtacatctccctggtgacctggcagcgcccagatgcacctgcgaaccaccagaatgtggccgccttccaccctaagatgggtcccagcttccccagcccgaagcctggcagcgagcggctgtccttcgtctctgccaagcagagcactgggcaagacacagaggcagagctccaggacgccacgctggccctccacgggctcacggtggaggacgagggcaactacacttgcgagtttgccaccttccccaaggggtccgtccgagggatgacctggctcagagtcatagccaagcccaagaaccaagctgaggcccagaaggtcacgttcagccaggaccctacgacagtggccctctgcatctccaaagagggccgcccacctgcccggatctcctggctctcatccctggactgggaagccaaagagactcaggtgtcagggaccctggccggaactgtcactgtcaccagccgcttcaccttggtgccctcgggccgagcagatggtgtcacggtcacctgcaaagtggagcatgagagcttcgaggaaccagccctgatacctgtgaccctctctgtacgctaccctcctgaagtgtccatctccggctatgatgacaactggtacctcggccgtactgatgccaccctgagctgtgacgtccgcagcaacccagagcccacgggctatgactggagcacgacctcaggcaccttcccgacctccgcagtggcccagggctcccagctggtcatccacgcagtggacagtctgttcaataccaccttcgtctgcacagtcaccaatgccgtgggcatgggccgcgctgagcaggtcatctttgtccgagagacccccaacacagcaggcgcaggggccacaggcggcatcatcgggggcatcatcgccgccatcattgctactgctgtggctgccacgggcatccttatctgccggcagcagcggaaggagcagacgctgcagggggcagaggaggacgaagacctggagggacctccctcctacaagccaccgaccccaaaagcgaagctggaggcacaggagatgccctcccagctcttcactctgggggcctcggagcacagcccactcaagaccccctactttgatgctggcgcctcatgcactgagcaggaaatgcctcgataccatgagctgcccaccttggaagaacggtcaggacccttgcaccctggagccacaagcctggggtcccccatcccggtgcctccagggccacctgctgtggaagacgtttccctggatctagaggatgaggagggggaggaggaggaagagtatctggacaagatcaaccccatctatgatgctctgtcctatagcagcccctctgattcctaccagggcaaaggctttgtcatgtcccgggccatgtatgtgtga

SEQ ID NO: 111 - DNA, 3108 bp, Homo sapiens
atggccccgcggctgcagctggagaaggcggcctggcgctgggcggagacggtgcggcccgaggaggtgtcgcaggagcacatcgagaccgcttaccgcatctggctggagccctgcattcgcggcgtgtgcagacgaaactgcaaaggaaatccgaattgcttggttggtattggtgagcatatttggttaggagaaatagatgaaaatagttttcataacatcgatgatcccaactgtgagaggagaaaaaagaactcatttgtgggcctgactaaccttggagccacttgttatgtcaacacatttcttcaagtgtggtttctcaacttggagcttcggcaggcactctacttatgtccaagcacttgtagtgactacatgctgggagacggcatccaagaagaaaaagattatgagcctcaaacaatttgtgagcatctccagtacttgtttgccttgttgcaaaacagtaataggcgatacattgatccatcaggatttgttaaagccttgggcctggacactggacaacagcaggatgctcaagaattttcaaagctctttatgtctctattggaagatactttgtctaaacaaaagaatccagatgtgcgcaatattgttcaacagcagttctgtggagaatatgcctatgtaactgtttgcaaccagtgtggcagagagtctaagcttttgtcaaaattttatgagctggagttaaatatccaaggccacaaacagttaacagattgtatctcggaatttttgaaggaagaaaaattagaaggagacaatcgctatttttgcgagaactgtcaaagcaaacagaatgcaacaagaaagattcgacttcttagccttccttgcactctgaacttgcagctaatgcgttttgtctttgacaggcaaactggacataagaaaaagctgaatacctacattggcttctcagaaattttggatatggagccttatgtggaacataaaggtgggtcctacgtgtatgaactcagcgcagtcctcatacacagaggagtgagtgcttattctggccactacatcgcccacgtgaaagatccacagtctggtgaatggtataagtttaatgatgaagacatagaaaagatggaggggaagaaattacaactagggattgaggaagatctagcagaaccttctaagtctcagacacgtaaacccaagtgtggcaaaggaactcattgctctcgaaatgcatatatgttggtttatagactgcaaactcaagaaaagcccaacactactgttcaagttccagcctttcttcaagagctggtagatcgggataattccaaatttgaggagtggtgtattgaaatggctgagatgcgtaagcaaagtgtggataaaggaaaagcaaaacacgaagaggttaaggagctgtaccaaaggttacctgctggagctgagccctatgagtttgtctctctggaatggctgcaaaagtggttggatgaatcaacacctaccaaacctattgataatcacgcttgcctgtgttcccatgacaagcttcacccggataaaatatcaattatgaagaggatatctgaatatgcagctgacattttctatagtagatatggaggaggtccaagactaactgtgaaagccctgtgtaaggaatgtgtagtagaacgttgtcgcatattgcgtctgaagaaccaactaaatgaagattataaaactgttaataatctgctgaaagcagcagtaaagggcagcgatggattttgggtggggaagtcctccttgcggagttggcgccagctagctcttgaacagctggatgagcaagatggtgatgcagaacaaagcaacggaaagatgaacggtagcaccttaaataaagatgaatcaaaggaagaaagaaaagaagaggaggaattaaattttaatgaagatattctgtgtccacatggtgagttatgcatatctgaaaatgaaagaaggcttgtttctaaagaggcttggagcaaactgcagcagtactttccaaaggctcctgagtttccaagttacaaagagtgctgttcacagtgcaagattttagaaagagaaggggaagaaaatgaagccttacataagatgattgcaaacgagcaaaagacttctctcccaaatttgttccaggataaaaacagaccgtgtctcagtaactggccagaggatacggatgtcctctacatcgtgtctcagttctttgtagaagagtggcggaaatttgttagaaagcctacaagatgcagccctgtgtcatcagttgggaacagtgctcttttgtgtccccacgggggcctcatgtttacatttgcttccatgaccaaagaagattctaaacttatagctctcatatggcccagtgagtggcaaatgatacaaaagctctttgttgtggatcatgtaattaaaatcacgagaattgaagtgggagatgtaaacccttcagaaacacagtatatttctgagcccaaactctgtccagaatgcagagaaggcttattgtgtcagcagcagagggacctgcgtgaatacactcaagccaccatctatgtccataaagttgtggataataaaaaggtgatgaaggattcggctccggaactgaatgtgagtagttctgaaacagaggaggacaaggaagaagctaaaccagatggagaaaaagatccagattttaatcaaagcaatggtggaacaaagcggcaaaagatatcccatcaaaattatatagcctatcaaaagcaagttattcgccgaagtatgcgacatagaaaagttcgtggtgagaaagcacttctcgtttctgctaatcagacgttaaaagaattgaaaattcagatcatgcatgcattttcagttgctccttttgaccagaatttgtcaattgatggaaagattttaagtgatgactgtgccaccctaggcacccttggcgtcattcctgaatctgtcattttattgaaggctgatgaaccaattgcagattatgctgcaatggatgatgtcatgcaagtttgtatgccagaagaagggtttaaaggtactggtcttcttggacattaa

SEQ ID NO: 112 - DNA, 921 bp, Homo sapiens
atgtccttgaagcttcaggcaagcaatgtaaccaacaagaatgaccccaagtccatcaactctcgagtcttcattggaaacctcaacacagctctggtgaagaaatcagatgtggagaccatcttctctaagtatggccgtgtggccggctgttctgtgcacaagggctatgcctttgttcagtactccaatgagcgccatgcccgggcagctgtgctgggagagaatgggcgggtgctggccgggcagaccctggacatcaacatggctggagagcctaagcctgacagacccaaggggctaaagagagcagcatctgccatatacagtggctacatctttgactatgattactaccgggacgacttctacgacaggctcttcgactaccggggccgtctgtcgcccgtgccagtgcccagggcggtccctgtgaagcgaccccgggtcacagtccctttggtccggcgtgtcaaaactaacgtacctgtcaagctctttgcccgctccacagctgtcaccaccagctcagccaagatcaagttaaagagcagtgagctgcaggccatcaagacggagctgacacagatcaagtccaatatcgatgccctgctgagccgcttggagcagatcgctgcggagcaaaaggccaatccagatggcaagaagaagggtgatggaggtggcgccggcggcggcggcggtggtggtggcagcggtggcggtggcagtggtggtggcggtggcggtggcagcagccggccaccagccccccaagagaacacaacttctgaggcaggcctgccccagggggaagcacggacccgagacgacggcgatgaggaagggctcctgacacacagcgaggaagagctggaacacagccaggacacagacgcggatgatggggccttgcagtaa

SEQ ID NO: 113 - DNA, 4161 bp, Homo sapiens
atgctgcgctacctgctgaaaacgctgctgcagatgaacttgttcgcggactctctggccggggacatctccaactccagcgagctgctcttgggcttcaactcctcgctggcggcgctcaaccacaccctgctgcctcccggcgatccctctctcaacgggtcaagggtaggaccggaggacgctatgccccgcatcgtggagcagccgccagatctgctggtctcccgaggcgagcccgccacgttgccctgccgcgctgaaggccgaccccgacccaacattgagtggtacaagaacggggcgcgtgtggccactgtgcgggaggatccgcgtgcgcaccgcctgctgctgcccagcggcgccctcttcttcccgcgcatcgtgcacgggcgccgcgcgcggccggacgaaggtgtctacacttgcgtggctcgcaactacctgggggcagcagcgagcagaaacgcctcgctggaagtggcagtcctccgtgatgatttccggcagtctcctggaaacgtggtggtggcagtgggggagccagcagtactggaatgcgtgcccccccgcggccacccggagccttccgtgtcctggaggaaggacggtgcaagactcaaggaagaggaaggaaggatcacgatccgtggagggaagctgatgatgtcacatacactcaagagcgatgcaggcatgtatgtgtgcgtagcctccaacatggcgggagaacgggagagtgcggcagctgaagtcatggtactggagcgtccctcattcctgcgcagaccagtgaatcaggtggtcctggctgatgcccctgtgactttcctatgtgaggtgaagggggatcccccacctcgtctacgctggcgcaaggaggatggggaactgcccacaggcaggtatgagatccggagtgaccacagcctttggattgggcatgtgagtgccgaagatgagggaacgtacacctgtgtggcggagaacagtgtgggccgcgctgaagcatctggctccctcagtgttcacgtcccaccccagttggtgacccagccccaggaccagatggcagctcctggagagagcgtggctttccagtgcgagaccaaaggaaaccccccacctgccatcttctggcagaaggaggggagtcaggtcctgcttttccccagtcagtcacttcagccgacggggcgcttctcagtgtctccaagaggccaacttaacatcaccgcggtgcagcgtggggatgctgggtactacgtgtgccaggctgtcagtgtggctggcagcatcctggccaaggccctgctggagataaaaggagcctctttggatgggctgcctcctgtcatcctccagggaccagccaatcagacgctggtgcttggctcctccgtgtggctgccctgcagagtgactgggaaccctcaacccagtgtccgatggaagaaggatgggcagtggctgcagggggatgacctccagttcaagacaatggccaacggtaccctgtacatcgccaatgtgcaggagatggacatgggcttctacagctgcgtggccaagagttccacaggggaagccacatggagcggctggcttaagatgcgggaagactggggagtatcaccagacccccctacagaacccagttcccctccgggggctccctctcagccagtggtcactgagatcaccaagaacagcattaccctgacctggaagcccaacccacaaactggggctgcagtcacgtcttatgtgatagaggccttcagcccagcagctggcaacacatggcgtactgtggcagatggcgtgcagctggagacacacacagtcagcggtctgcagcccaataccatctacctgtttctggttcgagcagtgggagcctggggcctcagtgagcccagccccgtctctgagcctgtccgtacacaggatagcagcccctctaggccagtggaggacccatggagaggccagcagggactggcggaagtggctgtgcgcctgcaggagcccatagtcctgggaccccggaccctgcaggtgtcctggactgtggatggcccagtccagctggtgcaaggtttccgggtgtcttggagggtagcaggccctgagggaggaagctggacaatgttggacctacagtccccaagccagcaaagtactgtgctaagaggactccctccagggacccaaatccagatcaaggtgcaagcccaaggccaggaggggctgggggctgaaagcctctctgtgaccaggagcattcctgaggaggcccccagtggccccccacagggagtggcggtggccttggggggtgatggcaacagcagtatcactgtgtcctgggaacctccactcccctcccagcaaaatggggtcatcacggaataccagatctggtgcctgggcaatgagagccgctttcacctcaatcgatctgcagcaggctgggcacgctccgcaatgctccgaggactggtgcccggtctcctctatcgaaccctggtcgcggcggccaccagcgcaggcgtgggcgtgcccagtgccccagtgctggtgcagctgccgtccccgccggacctggagcccgggctggaggtgggcgcggggctggcggtgcggctggcgagggtgctgcgggagcccgccttcctcgcgggcagcggcgcagcctgcggggcgctgcttctcgggctctgcgccgccctctactggcgccggaaacagcgcaaagagctcagccactacacggcctcttttgcctacacaccggcagtgtccttcccgcactcagagggcctctctggagccagttccaggccacccatgggccttggccccgccccctactcatggctggcagattcgtggccccacccatctcgaagcccctcggcccaggaacccaggggaagctgctgccctagcaatcctgacccggacgacagatattacaacgaagcgggaatctccctgtatctagctcagacggccaggggcacggccgcccctggcgagggtcctgtctatagcaccattgacccagcgggggaggagctgcagaccttccatgggggcttcccccaacatccctcaggagatctgggtccctggagccagtacgctcctccagagtggagccagggggacagtggagccaagggaggcaaagtgaagcttctggggaaacctgtgcagatgccctctctgaactggccagaagccctgcccccacctcctccttcttgtgaactgagctgcctagaagggccggaggaggagctggagggcagctcagagccagaggagtggtgcccgccaatgcctgagagaagtcacctgacggagcccagctccagtggagggtgcctggtcaccccatcccgaagggaaaccccctctcccacaccttcctatggacagcagtccacagccactcttacaccctcacctcctgaccctccccagcccccaactgacatgccccatctccatcagatgcccaggagggtgccccttgggccgagttcccctctcagtgtatcccagcccatgctgggcatccgtgaagcgaggcctgctggcttgggtgctggccctgcagcctcaccccacctcagccccagtcctgcccctagcacagccagcagtgccccaggcagaacctggcaggggaatggggagatgactcccccacttcaaggaccccgtgctcgattccggaagaaacccaaggctcttccctacaggagggagaacagtcctggggacttgcccccaccacccttgccaccgccagaggaagaggcgagctgggccctagagctgagggcagcaggcagcatgtcctccctggagcgggagcgcagtggggagaggaaagcggtccaggccgtgcccctggcagcccagcgggtgctccacccagatgaagaggcctggctcccatacagcagaccaagcttcctgtcccggggccagggcaccagcacatgttccacggccggcagcaactcttccaggggctccagcagctctaggggctcccggggccctggccggagccggagtcggagtcagagccggagccagagccaaaggccaggacagaaacgccgagaggaaccaagatga

SEQ ID NO: 114 - DNA, 1566 bp, Homo sapiens
atgctgccccgtcggcctctggcgtggcccgcgtggctgttgcggggtgctccgggagccgcgggttcttggggtcggccggttggccccctggcccgcagaggctgctgctccgccccggggacccccgaggtgccgctgacccgggagcgctaccccgtgcggcgcttgccgttctccacggtgtctaagcaggacctggccgcctttgagcgcatcgtgcccggcggggtcgtcacggacccggaagcgctgcaggctcccaacgtggactggttgcggacgctgcgaggctgtagcaaggtgctgctgaggccacggacgtcggaggaggtgtcccacatcctcaggcactgccacgagaggaacctggccgtgaacccacaggggggcaacacaggcatggtgggtggcagcgtccccgtctttgacgagatcatcctctccactgcccgcatgaaccgggtcctcagcttccacagcgtgtctggaattctggtttgccaggcgggctgcgtcctggaggagctgagccggtatgtggaggaacgggacttcatcatgccgctggacttaggagccaagggcagctgccacatcgggggaaacgtggcaaccaacgctggaggcctgcggtttcttcgatatggctcactgcatgggactgtcctgggcctggaagtggtgctggccgacggcactgtcctggactgcctgacctccctgaggaaggacaacacgggctatgacctgaagcagctgttcatcgggtcggagggcactttggggatcatcaccacggtgtccatcttgtgtccacccaagcccagggctgtgaacgtggctttcctcggctgcccaggctttgctgaggttctgcagaccttcagcacctgcaaggggatgctgggtgagatcctgtctgcattcgagttcatggatgctgtgtgcatgcagctggtcgggcgccatctccacctggccagcccggtgcaagagagtccgttttacgtcctcatcgagacttcaggctccaacgcaggccatgacgctgagaagctgggccacttcctggagcacgcgctgggctccggcctggtgaccgatgggaccatggccaccgaccagaggaaagtcaagatgctgtgggccctgagggaaaggatcacagaggcgctgagccgggatggctacgtgtacaagtacgacctctccctccctgtggagcggctctacgacatcgtgactgacctgcgcgcccgcctcggcccgcacgccaagcacgtggtgggctatggccaccttggagatggtaacctgcacctcaatgtgacggcggaggccttcagcccctcgctcctggctgccctggagccccacgtgtacgagtggacggccgggcagcagggcagcgtcagcgcggagcacggagtgggcttcaggaagagggacgtcctgggctacagcaagccaccgggggccctgcagctcatgcagcagctcaaggccctgctggaccccaagggcatcctcaacccctacaagacgctgcccagccaggcctga

SEQ ID NO: 115 - DNA, 648 bp, Homo sapiens
atggaaaaactctacagtgaaaatgaaggaatggcttcaaaccaaggaaagatggaaaatgaagaacagccacaagacgagagaaagccagaagtaacttgtactctggaagacaagaagttagaaaacgagggaaagacagaaaacaagggcaaaacaggagatgaggaaatgttaaaggataaaggaaagccagagagtgagggagaggcaaaagaaggaaagtcagagagggagggagagtcagagatggagggaggatcagagagagagggaaaaccagagatagagggaaagccagagagtgaaggagagccagggagtgaaacaagggctgcaggaaagcgcccagctgaggatgatgtacccaggaaagccaaaagaaaaactaataaggggctggctcattacctcaaggagtataaagaggccatacatgatatgaatttcagcaatgaggacatgataagagaatttgacaatatggctaaggtgcaggatgagaagagaaaaagcaaacagaaattgggggcgtttttgtggatgcaaagaaatttacaggaccccttctaccctagaggtccaagggaattcaggggtggctgcagggccccacgaagggacattgaagacattccttatgtgtag

SEQ ID NO: 116 - DNA, 972 bp, Homo sapiens
atggccgctgcgcgcccagaggcccagagtcggagctcaccgactccggagtcgcgatcccaggagccactggacctggtcctggtgcctgatgactgccggcctggcacacccccgagtgacctcatcgagatccaggtggtgaaggtgacggacaccacgctggtccctgagcccccggagccaggttctttccactgtgccttgtgccctgctgccttccggctggtttccgagctgctgttccacgaacatggccacttggctggggccgagggaggcgggcagggtggggacccgagccggtgccacgtgtgcggccacagctgcccgggccccgccagcctgcgcgcgcactacagcttgcacacgggggagcggccctaccgctgcgcgctctgcccccgcgccttcaaggccttggcgcccctgctccggcaccagcaccggcacggggtggagccgggcacctctcggaggcctccggacacagcggccgttgcagaacagaggcccggggtggccccggagagggcggaggtggtgatggcggcggcggcggcgggcgcagcggtggggaagccttttgcctgcaggttctgcgccaagcccttccgccgctcctcagacatgcgagaccacgagcgcgtgcacactggcgagcggccataccattgcggcatctgcggcaagggcttcacccagtcctcggtgcttagcggccacgcccgcatccacactggcgagcgcccgttccgctgcacgctctgcgaccgcaccttcaacaactcctccaacttccgcaagcaccagcgcacccacttccacgggccggggccggggctgggagactctggaggccagctgggctcgtcggcggctgaggggtcggggagcgggtgtggggtaggggaccctgcggaggaggggcggggggagaccgcgaaggtgaaggtggaggccgaccagtag

SEQ ID NO: 117 - DNA, 552 bp, Homo sapiens
atgatcaagctgttctcgctgaagcagcagaagaaggaggaggagtcggcgggcggcaccaagggcagcagcaagaaggcgtcggcggcgcagctgcggatccagaaggacataaacgagctgaacctgcccaagacgtgtgatatcagcttctcagatccagacgacctcctcaacttcaagctggtcatctgtcctgatgagggcttctacaagagtgggaagtttgtgttcagttttaaggtgggccagggttacccgcatgatccccccaaggtgaagtgtgagacaatggtctatcaccccaacattgacctcgagggcaacgtctgcctcaacatcctcagagaggactggaagccagtccttacgataaactccataatttatggcctgcagtatctcttcttggagcccaaccccgaggacccactgaacaaggaggccgcagaggtcctgcagaacaaccggcggctgtttgagcagaacgtgcagcgctccatgcggggtggctacatcggctccacctactttgagcgctgcctgaaatag

SEQ ID NO: 118 - DNA, 2784 bp, Homo sapiens
atggcggatgcggagccggaggctgggggcggcagcgaggatggcggcggcggcggcggcccggctcctccgggccagagcggcagcgtcgcacgtgtggccccgctgggccccgagcagctgcggcaggtcctggagcaggtgacgaaggcgcagccgccgccgccgccgccccccttcgtgctgcgggacgcggcgcggcggctgcgggacgcggcccaacaggccgccctgcagcggggccggggcaccgagcccccgcgcctgccgcgcctgctcccgccccagcaactagaagccatttgtgtcaaggtaacgtctggagaaacaaaaggtcaggaaaggccaatgctcctaccgaccacaatccagccccaaactgcaagaaagagccagctgccccgggggaattcctgcctggtggggctccatatcgccagccctcagctgctcagggtacagccgcttgtgagaaccgagccacagtcctgcttcctaagtgacttatgccaacctcctgctcaggggtttgtacagagaccactgccagccctccaggtggtccctgcaaagagagtcccagcccccaaggctccagatgaacagggctccatgttgacccctttgtctgcctctgacccgctggcagtaacatctctttcatccagttcagcacatccatttatttccaacttgcatacaagacatactgagaaactaaaaaaatcgttaaaagtaaagacacgttctggacgggtatctcgacctcccaaatataaagctaaagattataagttcataaaaacagaggatctggcggatggtcatctgtcagattctgatgattactcagaactctgtgtggaagaagatgaagatcagagggagaggcacgcactctttgacttatcgagctgctccctgaggcccaaaagctttaagtgtcagacttgtgaaaagtcatatatagggaaggggggactggcccgacattttaaacttaacccaggccacggccagttggaccccgagatggtgctgtctgagaaagccagtggaagcaccctccgggggtgcacggaggaaaggacgctcagcctgacctccctggggctgtccatgccagcggatccatgtgagggaggggcccgctcctgcttggtgacagagtcagcacgcggtggcctgcagaatggtcagtctgtagacgttgaagagacattgccatctgaaccagaaaatggagctcttttgcgatcagagagataccaaggacctagaagacgcgcatgctcagagacccttgcagagtcccgcacagctgtcctccagcagagaagagctgctcagctacctggtggccctgctgcggcaggggagcagagggcgtcgccaagcaaagccaggctcaaggagttcctccagcagtgtgaccgggaggatctggtggaattggctctgcctcagctggctcaggttgtgaccgtgtatgagtttcttctgatgaaggttgaaaaagatcatctagcaaagccttttttcccagctatatataaggaatttgaagagttgcataaaatggttaagaaaatgtgccaagattacctcagtagttctggtctgtgttcccaggagaccctggaaataaacaatgataaggttgctgagtcattaggaatcacagaattcctacggaagaaagaaatacacccagacaaccttggacccaagcacctcagccgagacatggatggggagcagctagagggagctagcagcgagaagagggaacgtgaggctgcggaggagggactggcctcagtgaaaaggcccagaagagaagccctgtccaacgataccactgaatctcttgctgccaacagcagaggccgggagaagcccaggcccttgcatgctttggccgctggtttttcccctccagtaaatgtgactgtctctccccgttctgaagaaagccatacaacgacggtttctggtggcaatgggagcgtgttccaggcgggcccgcagcttcaggcactggctaacttagaagccaggagggggtctataggtgctgctctctcatcccgggatgtcagtgggctgcctgtttatgctcagtcaggagagcctaggaggctgacccaggcacaggtggcagcgtttcctggagagaatgctttggaacactcttcagaccaggacacctgggacagcctgaggagcccgggtttctgcagccctttgtcatctggtggtggagcagagtccctgccgcctggggggcctggacatgcagaggcaggacacctcggcaaggtttgtgacttccacctgaaccaccagcagcccagccccaccagcgtcctgcctacagaggtggcagcccctccgcttgagaaaattttgtctgtggatagcgtggcagtggactgtgcctacaggactgtgcccaagccagggcctcagcctggcccacatggatcactattgactgaagggtgtctcagaagcctttcgggggacttgaaccggttcccctgtgggatggaggtgcactctggccagagagaactggagagcgtggttgctgtcggcgaagccatggcttttgaaatttccaatgggagccatgagttactgtctcagggacagaagcagatttttattcagacttccgatgggcttatcttgtcccctccaggtacaatagtgtctcaggaggaggacattgtcacagtgactgatgcagaggggcgtgcctgcggatgggcccgctag

SEQ ID NO: 119 - DNA, 783 bp, Homo sapiens; identical to SEQ ID NO: 108

SEQ ID NO: 120 - DNA, 996 bp, Homo sapiens
atgggcggagagcaggaggaggagcggttcgacggcatgttgctggccatggctcagcagcacgagggcggcgtgcaggagcttgtgaacaccttcttcagcttccttcgacgcaaaacagactttttcattggaggagaagaagggatggcagagaagcttatcacacagactttcagccaccacaatcagctggcacagaagacccggcgggagaagagagcccggcaggaggccgagcggcgggagaaggcggagcgggcggccagactggccaaggaagccaagtcagagacctcagggccccagatcaaggagctaactgatgaagaggcagagaggctgcagctagagattgaccagaaaaaggatgcagagaatcatgaggcccagctcaagaacggcagccttgactccccagggaagcaggatactgaggaagatgaggaggaagatgagaaggacaaaggaaaactgaagcccaacctaggcaacggggcagacctgcccaattaccgctggacccagaccctgtcggagctggacctggcggtccctttctgtgtgaacttccggctgaaagggaaggacatggtggtggacatccagcggcggcacctccgggtggggctcaaggggcagccagcgatcattgatggggagctctacaatgaagtgaaggtggaggagagctcgtggctcattgaggacggcaaggtggtgactgtgcatctggagaagatcaataagatggagtggtggagccgcttggtgtccagtgaccctgagatcaacaccaagaagattaaccctgagaattccaagctgtcagacctggacagtgagactcgcagcatggtggaaaagatgatgtatgaccagcgacagaagtccatggggctgccaacttcagacgaacagaagaaacaggagattctgaagaagttcatggatcaacatccggagatggatttttccaaggctaaattcaactag

SEQ ID NO: 121 - DNA, 2292 bp, Homo sapiens
atgcagcgcgctggctccagcggtggccgcggggaatgtgacatcagcggcgccgggcgcttggggctggaggaggcagctcgcctcagctgcgctgtgcacacctcgcccgggggaggacgcagacccgggcaggcggcagggatgtcggcgaaggagaggccaaagggcaaagtgatcaaggacagcgtcaccctcctgccctgcttttatttcgtcgagttgcctatattggcatcatcggtggttagcctctatttcctcgaactcacagatgtcttcaaacctgtgcactctggatttagctgctatgaccggagtcttagcatgccgtacattgaaccaacccaggaggcaattccattcctcatgttgcttagcttggcttttgctggacctgcaattacgattatggtaggagaaggaattctctactgttgcctctccaaaagaagaaatggggtcggactagagcccaacattaatgctggaggctgcaacttcaattccttcctcagacgagctgtcagattcgttggtgttcatgtatttggattatgctctacagctctcattacagatatcatacagctgtccacaggatatcaagcaccttactttctgactgtgtgcaaaccaaactatacctctctgaatgtatcttgcaaagaaaattcctacattgtggaagatatttgctcaggatctgacctcacagttatcaacagtggcagaaagtccttcccttctcaacatgcaacccttgctgcctttgcagctgtgtatgtttcgatgtacttcaattccacattaacggattcctctaagcttctgaaacctctcttggtcttcacatttatcatctgtggaataatctgcgggctaacacggataactcagtataagaaccacccagttgatgtctattgtggctttttaataggaggaggaattgcactgtacttgggcttgtatgctgtggggaatttcctgcccagtgatgagagtatgtttcagcacagagacgccctcaggtctctgacagacctcaatcaagatcccaaccgacttttatctgctaaaaatggtagcagcagtgatggaattgctcatacagaaggcatcctcaaccgaaaccacagagatgctagctctctgacaaatctcaaaagagcaaatgctgatgtggaaatcattactccacggagccccatggggaaggagaacatggttaccttcagcaataccttgccgcgagccaataccccatctgtagaagaccctgtcagaagaaatgcgagcattcatgcctctatggattccgctcgatcaaagcagctcctcacccagtggaagaataagaatgaaagtcgaaagttgtccttgcaagttatagagcctgagcctgggcagtcaccacccagatccatagaaatgaggtcaagctcagagccatcgagggtaggggtgaatggagaccaccatggtcctggcaatcagtacctcaaaatccagcctggcgctgtccccggatgtaacaacagcatgcctggagggccaagagtgtccattcagtcccgtcctgggtcctcacagttggtgcacatccctgaggagactcaggaaaacataagcacctcccccaaaagcagctctgctcgggccaagtggttaaaagctgctgaaaagactgtggcctgtaacagaagcaacagccagccccgaatcatgcaagtcatagccatgtccaagcagcagggtgtcctccaaagcagccccaagaacactgaaggcagcacggtctcctgcactggctccatccgctataaaaccttgacagaccatgagcccagtgggatagtgagggttgaggctcacccagagaacaacaggcccatcatacagatcccgtccactgaaggtgaaggcagtggctcctggaagtggaaagcccctgaaaagggcagccttcgccaaacttacgagctcaacgatctcaacagggactcagaaagctgtgagtctctgaaagacagctttggttctggagatcgcaagagaagcaacattgatagcaatgagcatcaccaccacggaattaccaccatccgcgtcaccccagtagagggcagcgaaattggctcagagacgctgtccatttcttcttcccgcgactccaccctgcggagaaagggcaatatcattctaatccctgaaagaagcaacagccccgaaaacactagaaatatcttctacaaaggaacctcccccacacgggcttataaggattga

SEQ ID NO: 122 - DNA, 5493 bp, Homo sapiens
atggccccctggcgcaaagctgacaaggagcggcacggcgtggccatatacaacttccaaggcagcggagccccccagctctccctgcagatcggcgatgtggtgcgaatacaggagacgtgtggagactggtataggggatacctcataaagcacaaaatgttacagggcatttttcctaagtcatttatccacatcaaggaagtgacagttgagaaaagaagaaatactgagaacatcattcctgcagaaattcctctggcacaagaagtgacaacgacactttgggaatggggaagcatctggaaacaactctatgtggccagcaaaaaggagcgttttctccaggtgcagtccatgatgtacgatctgatggagtggaggtcccagcttctctcaggaaccttacccaaggatgagctgaaggaactgaagcagaaagtcacgtccaaaattgactatggcaacaaaatccttgagcttgatttgattgtcagagatgaagacggaaatatcttggaccctgataataccagtgtcatcagcttgttccatgcacatgaggaagcaactgataaaatcacagagcgtatcaaagaagaaatgtcaaaagaccagccagattatgcaatgtattcccggatctcctcatcccccacccatagcctctatgtgtttgtgagaaactttgtgtgcagaattggggaagatgctgagctcttcatgtctctctacgaccccaacaagcaaacggtcataagtgagaactacctagtgcgatggggcagccggggcttccctaaggagattgagatgctcaacaatctgaaggtggtcttcacggatcttggaaacaaagacctcaacagggataaaatttacttgatttgtcaaatagtccgggtcggcaagatggatcttaaggatactggtgcaaagaagtgcacgcagggactgaggaggccctttggggtggcagttatggatataacagacatcatcaaggggaaagcagagagtgatgaagaaaagcagcacttcattccttttcacccggttacagctgagaatgacttcctacacagcctgctgggcaaagtcatagcctccaagggggacagtggagggcaaggcctctgggtgaccatgaagatgctggtgggtgacatcattcagattcgcaaggactatccacacctggtggacaggaccaccgtggtggccaggaagctgggattcccagagatcatcatgccaggggatgtcaggaacgacatctacattactctcttacaaggtgactttgacaagtacaacaagaccacacagaggaatgtggaagtcatcatgtgtgtgtgcgcggaggatggcaaaacgctgcctaatgcaatttgcgtgggagcaggggacaagcccatgaatgagtatcgctccgttgtgtactatcaagtcaaacagccacgctggatggaaacagtcaaggtggctgtccctattgaagacatgcagaggatccatctgcgattcatgtttcgacatcggtcatctctggaatctaaagataaaggagaaaagaactttgccatgtcctatgtgaagctgatgaaagaagatgggactactctacacgatggattccatgacttagttgtcctcaagggggacagcaagaagatggaggatgccagcgcatacctgacccttccttcttatcgacaccatgtggaaaacaagggggccacgctgagcaggagctccagcagtgttggggggctttctgtcagctcccgggatgtgttctccatttccaccctggtgtgctccacaaagctcactcagaatgtgggcttgctgggtttgctgaagtggcgtatgaagcctcaactgctacaggagaatttagaaaagttgaagattgtggatggagaggaagtggtgaagtttctccaggatactctggatgccctcttcaacatcatgatggagcattctcaaagtgatgaatatgacatcctcgtctttgatgccttgatttacataataggactcattgcagaccggaaatttcagcatttcaacaccgttctggaggcttacatccaacagcatttcagtgcgaccttggcttacaagaaattgatgacagtgctgaagacttacttggatacctccagcagaggggagcaatgtgagccaatcctaagaacgctgaaggctttggaatatgtgttcaagttcattgttcggtcgaggacattattttcacagctttatgaaggcaaagaacagatggagtttgaagaatccatgagacggctctttgaatccatcaacaatctgatgaaaagtcaatacaaaactaccatccttttgcaggtggcggctttgaaatacatcccatctgtcctgcatgatgtagaaatggtctttgatgcgaagttactcagccaactcctgtatgagttctacacctgcatccctcctgtgaaactccagaagcagaaagtacagtctatgaatgagatagtccagagcaacctctttaaaaagcaagaatgccgggacattctgcttcctgtcatcaccaaagagctgaaggagctgctggagcagaaggatgacatgcaacaccaggtcctggagaggaagtactgcgttgaattgctcaacagcatcttggaagtccttagctaccaggatgcggccttcacctaccaccatatccaggagatcatggtccagctgctgcggacagtgaaccggacagtcatcaccatgggccgggatcacattctgattagtcactttgtggcatgtatgacagccatcttaaaccagatgggtgaccagcactactccttctacattgagaccttccagaccagctctgaacttgtggacttcttgatggagaccttcatcatgttcaaggacctcattggaaagaacgtgtaccctggagactggatggccatgagcatggttcaaaacagggtcttcctgagagctatcaacaagtttgcagaaaccatgaaccagaagttcctagaacacacgaactttgagttccagctgtggaacaactattttcatctggcagtggcttttatcacccaggattctctgcagctggagcagttctcacacgccaaatacaacaaaatcctgaataagtatggggacatgagacggctaattggcttctccatccgtgatatgtggtacaagcttggtcagaacaaaatctgcttcatcccaggcatggtaggacctatattagagatgacacttatccctgaggctgagctccggaaagccaccataccaatcttcttcgacatgatgctgtgtgaatatcaaagaagtggggatttcaaaaagtttgaaaacgaaatcatcctgaagctggaccacgaggtagaagggggccgaggcgacgagcagtacatgcagctcctggagtcaatcctgatggaatgtgctgcagagcacccaaccattgccaagtcggtggagaacttcgtgaacctggtcaaaggcctcctggagaagctgctggattaccggggtgtgatgacagatgagagcaaagacaaccgcatgagctgcaccgtgaacctgctgaatttctacaaagataacaacagggaggagatgtacataaggtacctgtacaaactccgcgatcttcacctggactgtgacaattacacagaggctgcctacacgctccttctccacacctggcttctcaagtggtcggatgagcagtgtgcatcacaggtcatgcagacaggccagcagcacccccagacacaccggcagctgaaggagacgctctacgagaccatcataggctactttgacaaaggaaagatgtgggaagaggccataagtctgtgcaaggagctggcggaacagtacgagatggagatctttgactatgagctgctcagccagaacctgatccagcaggcaaaattctatgaaagcatcatgaaaatcctcaggcccaaaccagactactttgctgttggatactacggccagggattcccctccttcctgcggaacaaagtgttcatctaccgcgggaaggaatatgagcgaagagaagatttccagatgcagctgatgacccagttccccaatgcagagaagatgaacaccacctctgccccgggagatgatgtgaagaatgccccaggccagtatatccagtgcttcactgtccagcctgtcttggatgaacatcccaggttcaagaataagccagtgcctgaccagattataaacttctacaaatccaactacgtgcaaaggttccactactcccggcccgtgcgcagggggaccgtagacccagagaatgagtttgcttccatgtggattgagagaacctccttcgtgactgcatacaagctgccggggatcctgcgctggtttgaggtggtgcacatgtcgcagaccacaattagtcctctggagaatgccatagaaaccatgtccacggccaatgagaagatcctgatgatgataaaccagtaccagagtgatgagaccctccccatcaacccactctccatgctcctgaacgggattgtggaccctgctgtcatgggaggcttcgccaagtatgagaaggccttcttcactgaagagtatgtcagggaccaccctgaggaccaggacaagctgacccacctcaaggacctgattgcatggcagatccccttcttgggagctgggattaagatccatgagaaaagggtgtcagataacttgcgacccttccatgaccggatggaggaatgtttcaagaacctgaaaatgaaggtggagaaggagtacggtgtccgagagatgcctgactttgacgacaggagagtgggccgtcccaggtctatgctgcgctcatacagacagatgtccatcatctctctggcttccatgaattctgactgcagcacccccagcaagcctacctcagagagctttgacctggaattagcatcacccaagacgccgagagtggagcaggaggaaccgatctccccggggagcaccctgcctgaggtcaagctgcggaggtccaagaagaggacaaagagaagcagcgtagtttttgcggatgagaaagcagctgcagagtcggacctgaagcggctttccaggaagcatgagttcatgagtgacaccaacctctcggagcatgcggccatccccctcaaggcgtctgtcctctctcaaatgagctttgccagccagtccatgcctaccatcccagccctggcgctctcagtggcaggcatccctgggttggatgaggccaacacatctccccgcctcagccagaccttcctccaactctcagatggtgacaagaagacactcacacggaagaaggtcaatcagttcttcaagacaatgctggccagcaaatcggctgaagaaggcaaacagatcccagactcgctgtccacggacctgtga

SEQ ID NO: 123 - DNA, 1323 bp, Homo sapiens
atggggccgcccggctccccatggcagtgggtgacgctgctgctggggctgctgctccctcctgccgcccccttctggctcctcaatgtgctcttccccccgcacaccacgcccaaggctgagctcagtaaccacacacggcccgtcatcctcgtgcccggctgcctggggaatcagctagaagccaagctggacaaaccagatgtggtgaactggatgtgctaccgcaagacagaggacttcttcaccatctggctggatctcaacatgttcctaccccttggggtagactgctggatcgataacaccagggttgtctacaaccggagctctgggctcgtgtccaacgcccctggtgtccagatccgcgtccctggctttggcaagacctactctgtggagtacctggacagcagcaagctggcagggtacctgcacacactggtgcagaacctggtcaacaatggctacgtgcgggacgagactgtgcgcgccgccccctatgactggcggctggagcccggccagcaggaggagtactaccgcaagctcgcagggctggtggaggagatgcacgctgcctatgggaagcctgtcttcctcattggccacagcctcggctgtctacacttgctctatttcctgctgcgccagccccaggcctggaaggaccgctttattgatggcttcatctctcttggggctccctggggtggctccatcaagcccatgctggtcttggcctcaggtgacaaccagggcatccccatcatgtccagcatcaagctgaaagaggagcagcgcataaccaccacctccccctggatgtttccctctcgcatggcgtggcctgaggaccacgtgttcatttccacacccagcttcaactacacaggccgtgacttccaacgcttctttgcagacctgcactttgaggaaggctggtacatgtggctgcagtcacgtgacctcctggcaggactcccagcacctggtgtggaagtatactgtctttacggcgtgggcctgcccacgccccgcacctacatctacgaccacggcttcccctacacggaccctgtgggtgtgctctatgaggatggtgatgacacggtggcgacccgcagcaccgagctctgtggcctgtggcagggccgccagccacagcctgtgcacctgctgcccctgcacgggatacagcatctcaacatggtcttcagcaacctgaccctggagcacatcaatgccatcctgctgggtgcctaccgccagggtccccctgcatccccgactgccagcccagagcccccgcctcctgaataa

SEQ ID NO: 124 - DNA, 2595 bp, Homo sapiens
atggcggcgccgctcatccccctctcccagcagattcccactggaaattcgttgtatgaatcttattacaagcaggtcgatccggcatacacagggagggtgggggcgagtgaagctgcgctttttctaaagaagtctggcctctcggacattatccttgggaagatatgggacttggccgatccagaaggtaaagggttcttggacaaacagggtttctatgttgcactgagactggtggcctgtgcacagagtggccatgaagttaccttgagcaatctgaatttgagcatgccaccgcctaaatttcacgacaccagcagccctctgatggtcacaccgccctctgcagaggcccactgggctgtgagggtggaagaaaaggccaaatttgatgggatttttgaaagcctcttgcccatcaatggtttgctctctggagacaaagtcaagccagtcctcatgaactcaaagctgcctcttgatgtcctgggcagggtctgggacctcagtgacattgacaaggatgggcacttggatcgagatgagttcgctgtggccatgcacttggtgtaccgagccctggagaaggagcccgtgccctccgccctgcccccgtccctcatcccaccctccaagagaaagaagactgtgttccctggcgccgtccccgtcctgcctgccagccccccaccaaaagacagcctccgctccacgccgtcccacggcagcgtcagcagcctcaacagcacagggagcctgtcccccaagcacagcctcaagcaaacacagccaacagtgaactgggtggtgcccgtggcagacaagatgcgatttgatgagatattcctgaagaccgacctggacctggatggctacgtgagtggccaggaggtgaaggagatcttcatgcactcgggcctcacccagaaccttctagcacacatatgggccctggccgatacgaggcaaacggggaagttaagcaaagaccaattcgcgttagctatgtatttcattcagcagaaggtcagtaaaggcatcgaccctcctcaagtcctctcgccggacatggtcccgccttcggagagaggcacgcccggcccggacagttcaggctctctcggctccggggagtttactggcgtgaaggagcttgatgacatcagtcaagagattgcccagttacaaagagagaaatattcactggaacaagacattcgagaaaaggaagaggcaatcagacagaaaaccagcgaggtgcaggaattacaaaatgacctagaccgggaaacaagcagtttgcaggagctcgaggctcagaaacaggatgctcaagaccgcctggacgagatggaccagcagaaggccaagctccgagacatgctgagcgacgtccggcagaagtgccaggatgagactcagatgatctcatcactgaaaacgcaaatccaatctcaggaatctgacttaaagtcccaggaagacgatctgaaccgagccaagtcggagctgaaccgattgcagcaggaggaaacccagctggagcagagcattcaggctgggcgagtccagctggaaaccatcatcaagtccctgaagtcaacgcaagacgaaatcaaccaggcaaggagcaaactttcccagctgcatgaaagccgccaggaggcccacaggagcctggagcagtatgaccaggtgctcgatggagcccatggtgccagcctgaccgacctggccaacctgagcgaaggcgtctccctggcagagaggggcagttttggagccatggatgatcctttcaaaaataaagccttgttatttagcaacaacacgcaagagttgcatccggatcctttccagacagaagaccccttcaaatctgacccatttaaaggagctgaccccttcaaaggcgacccgttccagaatgacccctttgcagaacagcagacaacttcaacagatccatttggaggggaccctttcaaagaaagtgacccattccgtggctctgccactgacgacttcttcaagaaacagacaaagaatgacccatttacctcggatccattcacgaaaaacccttccttaccttcgaagctcgacccctttgaatccagtgatcccttttcatcctccagtgtctcctcaaaaggatcagatccctttggaaccttagatcccttcggaagtgggtccttcaatagtgctgaaggctttgccgacttcagccagatgtccaagcccccaccttctgggcctttcacctcctccttgggaggggcaggattctcagatgacccctttaaaagtaaacaggacactcctgctctgcctccgaagaaacctgctcctccacggcctaaaccgcccagcggtaaaagtacacctgtaagccagcttggttccgcagactttcccgaggcccccgatccattccagccactcggggctgacagcggcgacccgttccaaagtaaaaaggggtttggggacccgtttagtggaaaagacccatttgtcccctcctctgcagctaaaccttctaaggcctctgcctcgggctttgcagacttcacctctgtaagttga

SEQ ID NO: 125 - DNA, 990 bp, Homo sapiens
atgtgggggctcaaggttctgctgctacctgtggtgagctttgctctgtaccctgaggagatactggacacccactgggagctatggaagaagacccacaggaagcaatataacaacaaggtggatgaaatctctcggcgtttaatttgggaaaaaaacctgaagtatatttccatccataaccttgaggcttctcttggtgtccatacatatgaactggctatgaaccacctgggggacatgaccagtgaagaggtggttcagaagatgactggactcaaagtacccctgtctcattcccgcagtaatgacaccctttatatcccagaatgggaaggtagagccccagactctgtcgactatcgaaagaaaggatatgttactcctgtcaaaaatcagggtcagtgtggttcctgttgggcttttagctctgtgggtgccctggagggccaactcaagaagaaaactggcaaactcttaaatctgagtccccagaacctagtggattgtgtgtctgagaatgatggctgtggagggggctacatgaccaatgccttccaatatgtgcagaagaaccggggtattgactctgaagatgcctacccatatgtgggacaggaagagagttgtatgtacaacccaacaggcaaggcagctaaatgcagagggtacagagagatccccgaggggaatgagaaagccctgaagagggcagtggcccgagtgggacctgtctctgtggccattgatgcaagcctgacctccttccagttttacagcaaaggtgtgtattatgatgaaagctgcaatagcgataatctgaaccatgcggttttggcagtgggatatggaatccagaagggaaacaagcactggataattaaaaacagctggggagaaaactggggaaacaaaggatatatcctcatggctcgaaataagaacaacgcctgtggcattgccaacctggccagcttccccaagatgtga

SEQ ID NO: 126 - DNA, 2583 bp, Homo sapiens
atggcggcgtccaggagcgcgggagaggccggcccgggcggctcccagggacgcgtggtccgcatgaagcgcagaggcgggcgcgggccgcgccgcggtcctgctggcggtggggagaaggccctgaagaggctgaagctagcggtggaggagttcgtgcacgcgacttcggaaggcgaggctcccgggggttgcgaggggcgcggcgccccggtgagctttcgcccgggagggagaaaaagccgtaaggaactgaggaaggagaagcggcacctgcggaaagcacgccggctgcagaggacggcgggccccgaacagggtcccggcctgggaggccgaagcggagccgaagaagccagcggtcaccggcaggacacggaggagcgcgcccgcccagcccctagtcgggacccctcgcctcccaggaagccgcggccgtcccgggtcaaggccaaggccacggccgccaccgcaaagaccagaccctccgcagccgccaccgccgctgcccggaaacgggcgcttttagcggcgaacgaggaggaggaccgagagatccgaaagctggagcgttgcctcggtttgaacaagcgcaaaaagaaggacggcagcagctccgtgccgctgagctttgcacgcgacggtcttgactatattctgggagccctggagtctgggaaaaatagcggcttgtacgacagcagtggtgaggaggaggaagatgccggacagacactccccgaaagtgacttagagagtgactcccaggacgaaagtgaggaggaggaggagggagacgtagaaaaggaaaagaaggcgcaggaagcagaagcgcagagcgaggacgacgacgaggatacagaagaggaacagggggaagaaaaggaaaagggagcgcaggagaaaaggagggggaagagagtccgttttgcagaagatgaagaaaagagtgaaaattcctcggaggacggtgacataacggataagagtctttgtggaagtggtgaaaagtacatcccacctcatgtgaggcaagctgaggagacagtggacttcaagaaaaaggaagaactagaaaggctgaagaaacatgtaaaaggtctacttaacaggttgagtgaacccaacatggcttccatcagtgggcagctggaggaactgtacatggcccacagcagaaaggacatgaatgacaccctgacctccgctctcatgggtgcctgcgtcactgcctcggccatgcccagcagactgatgatggagcatgttctcttagtcagcatccttcaccacacagttggaatcgaggtcggtgcccactttctggaggcagtggtgaggaagttcgatgccatctataaatacggaagcgaagggaaagagtgtgacaacctgttcaccgtcattgcccatttatacaacttccacgtggtacagtctctcctcatcttcgacattttgaaaaaactgattggaactttcaccgaaaaagatattgaactgatcttgttaatgctgaaaaacgtgggtttttcattgaggaaagatgatgctttatcacttaaggaattgatcactgaagcccagaccaaagccagcggggcaggcagcgagtttcaggaccagaccaggattcggtttatgctagagacgatgttggccctgaagaacaatgacatgcgcaaaattccaggctatgaccccgagcccgtggagaagctgaggaaactgcagagagctttggtccgcaacgccggctcaggttctgagacgcagcttcgcgtctcctgggacagtgtcttgagtgcggagcagacgggtcgctggtggattgtggggtccgcctggagtggggccccgatgatcgacaacagtcaccatacgcacctgcagaagcagcttgtggggacggtcagttcaaagatcctagaactcgcccggaagcagaggatgaacacagacatccggagaaacatattctgcacaataatgacaagtgaagattttttggatgcttttgaaaagcttctgaagcttggacttaaggatcagcaggagagagaaatcattcacgttctcatggattgctgccttcaagagaaaacttacaatcccttctatgctttcctggctagcaaattctgtgaatatgaaaggagatttcagatgactttccagttcagcatatgggacaaatttcgggacttggaaaacttgccagctacgaatttctctaatttggttcatctggtggcccacttgttgaagacaaaatcgctttccctttccatcttaaaggtagttgaattcagtgaattggacaaacccagagtccgttttttacgaaaagtattaagtatcctattaatggaaacagaagttgaagacctcagtttaattttcacaagagtatctgacaacccaaagctgggggtgttacgtgagggtttgaagcttttcatcagccacttcttgctaaagaacgcacaggcccacagaagcgccgacgaagccaacgtgctgagagagaaagctgaccttgcaacgaagtgtctgcaaggaaaagcttccctgagaatgtag

SEQ ID NO: 127 - DNA, 1335 bp, Homo sapiens
atgagggaaatcgtgcacatccaggctggtcagtgtggcaaccagatcggtgccaagttctgggaggtgatcagtgatgaacatggcatcgaccccaccggcacctaccacggggacagcgacctgcagctggaccgcatctctgtgtactacaatgaagccacaggtggcaaatatgttcctcgtgccatcctggtggatctagaacctgggaccatggactctgttcgctcaggtccttttggccagatctttagaccagacaactttgtatttggtcagtctggggcaggtaacaactgggccaaaggccactacacagagggcgccgagctggttgattctgtcctggatgtggtacggaaggaggcagagagctgtgactgcctgcagggcttccagctgacccactcactgggcgggggcacaggctctggaatgggcactctccttatcagcaagatccgagaagaataccctgatcgcatcatgaataccttcagtgtggtgccttcacccaaagtgtctgacaccgtggtcgagccctacaatgccaccctctccgtccatcagttggtagagaatactgatgagacctattgcattgacaacgaggccctctatgatatctgcttccgcactctgaagctgaccacaccaacctacggggatctgaaccaccttgtctcagccaccatgagtggtgtcaccacctgcctccgtttccctggccagctcaatgctgacctccgcaagttggcagtcaacatggtccccttcccacgtctccatttctttatgcctggctttgcccctctcaccagccgtggaagccagcagtatcgagctctcacagtgccggaactcacccagcaggtcttcgatgccaagaacatgatggctgcctgtgacccccgccacggccgatacctcaccgtggctgctgtcttccgtggtcggatgtccatgaaggaggtcgatgagcagatgcttaacgtgcagaacaagaacagcagctactttgtggaatggatccccaacaatgtcaagacagccgtctgtgacatcccacctcgtggcctcaagatggcagtcaccttcattggcaatagcacagccatccaggagctcttcaagcgcatctcggagcagttcactgccatgttccgccggaaggccttcctccactggtacacaggcgagggcatggacgagatggagttcaccgaggctgagagcaacatgaacgacctcgtctctgagtatcagcagtaccaggatgccaccgcagaagaggaggaggatttcggtgaggaggccgaagaggaggcctaa

SEQ ID NO: 128 - DNA, 333 bp, Homo sapiens
atggctgcttcatcatcatcctcctcagctggtggggtcagtggaagttctgtcactggatctggtttcagtgtctcagaccttgccccaccacggaaagcccttttcacctaccccaaaggagctggagagatgttagaagatggctctgagagattcctctgcgaatctgtttttagctatcaagtggcatccacgcttaaacaggtgaaacatgatcagcaagttgctcggatggaaaaactagctggtttggtagaagagctggaggctgacgagtggcggtttaagcccatcgagcagctgctgggattcaccccctcttcaggttga

SEQ ID NO: 129 - DNA, 1887 bp, Homo sapiens
atggggagctgcgcgcggctgctgctgctctggggctgcacggtggtggccgcaggactgagtggagtagctggagtgagttcccgctgtgaaaaagcctgcaaccctcggatgggaaatttggctttggggcgaaaactctgggcagacaccacctgcggtcagaatgctaccgaactgtactgcttctacagtgagaacacggatctgacttgtcggcagcccaaatgtgacaagtgcaatgctgcctatcctcacctggctcacctgccatctgccatggcagactcatccttccggtttcctcgcacatggtggcagtctgcggaggatgtgcacagagaaaagatccagttagacctggaagctgaattctacttcactcacctaattgtgatgttcaagtcccccaggccggctgccatggtgctggaccgctcccaggactttgggaaaacatggaagccttataagtactttgcgactaactgctccgctacatttggcctggaagatgatgttgtcaagaagggcgctatttgtacttctaaatactccagtccttttccatgcactggaggagaggttattttcaaagctttgtcaccaccatacgatacagagaacccttacagtgccaaagttcaggagcagctgaagatcaccaaccttcgcgtgcagctgctgaaacgacagtcttgtccctgtcagagaaatgacctgaacgaagagcctcaacattttacacactatgcaatctatgatttcattgtcaagggcagctgcttctgcaatggccacgctgatcaatgcatacctgttcatggcttcagacctgtcaaggccccaggaacattccacatggtccatgggaagtgtatgtgtaagcacaacacagcaggcagccactgccagcactgtgccccgttatacaatgaccggccatgggaggcagctgatggcaaaacgggggctcccaacgagtgcagaacctgcaagtgtaatgggcatgctgatacctgtcacttcgacgttaatgtgtgggaggcatcagggaatcgtagtggtggtgtctgtgatgactgtcagcacaacacagaaggacagtattgccagaggtgcaagccaggcttctatcgtgacctgcggagacccttctcagctccagatgcttgcaaaccgtgttcctgccatccagtaggatcagctgtccttcctgccaactcagtgaccttctgcgaccccagcaatggtgactgcccttgcaagcctggggtggcagggcgacgttgtgacaggtgcatggtgggatactggggcttcggagactatggctgtcgaccatgtgactgtgcggggagctgtgaccctatcaccggagactgcatcagcagccacacagacatagactggtatcatgaagttcctgacttccgtcccgtgcacaataagagcgaaccagcctgggagtgggaggatgcgcaggggttttctgcacttctacactcaggtaaatgcgaatgtaaggaacagacattaggaaatgccaaggcattctgtggaatgaaatattcatatgtgctaaaaataaagattttatcagctcatgataaaggtactcatgttgaggtcaatgtgaagattaaaaaggtcttaaaatctaccaaactgaagattttccgaggaaagcgaacattatatccagaatcatggacggacagaggatgcacttgtccaatcctcaatcctggtttggaataccttgtagcaggacatgaggatataagaacaggcaaactaattgtgaatatgaaaagctttgtccagcactggaaaccttctcttggaagaaaagtcatggatattttaaaaagagagtgcaagtag

SEQ ID NO: 130 - DNA, 255 bp, Homo sapiens
atgcctctcgcaaaggatctccttcatccctctccagaagaggagaagaggaaacacaagaagaaacgcctggtgcagagccccaattcctacttcatggatgtgaaatgcccaggatgctataaaatcaccacggtctttagccatgcacaaacggtagttttgtgtgttggctgctccactgtcctctgccagcctacaggaggaaaagcaaggcttacagaaggatgttccttcaggaggaagcagcactaa

SEQ ID NO: 131 - DNA, 1737 bp, Homo sapiens
atgctaaggaggttggacaaaatcaggttcagaggtcacaagagagatgacttcctcgatctagcggagtctccaaatgcctcggacaccgaatgcagcgacgaaatccccctgaaggtaccgcggacctcgccccgggacagcgaggagctgagggaccctgctggtccagggaccctcatcatggccacaggagtccaggactttaaccggacagagtttgatcgactgaatgagatcaaaggtcacctggaaattgccttattggaaaaacatttcttacaggaggagctccggaagctgcgagaagaaaccaacgcggagatgctgcggcaggagctggaccgcgagcggcagcggcggatggagctggagcagaaggtgcaggaggtgctgaaggccagaaccgaggagcagatggctcagcagcccccaaaagggcaggcccaggccagcaatggagcagagcgccggagccaggggctgtcctcgcgcctgcagaagtggttctacgagcggttcggggagtacgtggaggacttccggttccagcccgaggagaacactgtggagacagaggaacccctgagcgcccgcaggttaactgaaaatatgagacggctcaagcgcggtgccaagccggtcactaactttgtgaagaacctctctgccttatccgactggtactccgtctacacgtctgccattgccttcaccgtgtacatgaatgccgtgtggcatggctgggccatcccattgttcttatttctagcaattctgaggttatccctcaattacctcatcgccagggggtggcggatacagtggagcatcgtgcccgaagtgtctgagcccgtggaacctccaaaggaagacctgactgtgtctgagaagttccagctggtgctggacgtcgcccagaaagcccagaaccttttcgggaagatggctgacatcctggagaagatcaagaacttgttcatgtgggtccagccggagatcacacagaagctgtatgtggcgctctgggctgccttcctggcctcctgcttcttcccctaccgcctggtggggcttgccgtgggactctatgctggtatcaagttcttcctcattgatttcatctttaaacgctgcccgaggctgcgcgccaagtacgacacgccctatatcatctggaggagtctccccaccgacccgcagctcaaggagcgctccagcgccgcagtctcacgcaggctgcagacgacctcgtcacggagctacgtacccagcgcaccggccggcctgggtaaagaggaggacgccggtcgcttccacagcaccaagaagggcaatttccacgagatcttcaatctgacagaaaacgagcgtccgctggcggtgtgcgagaatggctggcgctgctgcctcatcaacagggaccggaagatgcccacggactacatcaggaacggggtgctctacgtcacggagaattacttgtgcttcgaaagctccaaatctgggtcctcaaagaggaacaaagtcatcaagctagtggacatcacggacatccagaagtacaaggtcctgtctgtcctcccaggctcaggcatggggattgccgtgtcgacgccatccacccagaaaccgctcgtgtttggtgccatggtgcacagggatgaggccttcgagaccattctcagccagtacatcaagatcacctcagcggcagcgtctggcggggacagctag

SEQ ID NO: 132 - DNA, 795 bp, Homo sapiens
atggcggttggcaagaacaagcgccttacgaaaggcggcaaaaagggagccaagaagaaagtggttgatccattttctaagaaagattggtatgatgtgaaagcacctgctatgttcaatataagaaatattggaaagacgctcgtcaccaggacccaaggaaccaaaattgcatctgatggtctcaagggtcgtgtgtttgaagtgagtcttgctgatttgcagaatgatgaagttgcatttagaaaattcaagctgattactgaagatgttcagggtaaaaactgcctgactaacttccatggcatggatcttacccgtgacaaaatgtgttccatggtcaaaaaatggcagacaatgattgaagctcacgttgatgtcaagactaccgatggttacttgcttcgtctgttctgtgttggttttactaaaaaacgcaacaatcagatacggaagacctcttatgctcagcaccaacaggtccgccaaatccggaagaagatgatggaaatcatgacccgagaggtgcagacaaatgacttgaaagaagtggtcaataaattgattccagacagcattggaaaagacatagaaaaggcttgccaatctatttatcctctccatgatgtcttcgttagaaaagtaaaaatgctgaagaagcccaagtttgaattgggaaagctcatggagcttcatggtgaaggcagtagttctggaaaagccactggggacgagacaggtgctaaagttgaacgagctgatggatatgaaccaccagtccaagaatctgtttaa

SEQ ID NO: 133 - DNA, 717 bp, Homo sapiens
atgtcgcgttacgggcggtacggaggagaaaccaaggtgtatgttggtaacctgggaactggcgctggcaaaggagagttagaaagggctttcagttattatggtcctttaagaactgtatggattgcgagaaatcctccaggatttgcctttgtggaattcgaagatcctagagatgcagaagatgcagtacgaggactggatggaaaggtgatttgtggctcccgagtgagggttgaactatcgacaggcatgcctcggagatcacgttttgatagaccacctgcccgacgtccctttgatccaaatgatagatgctatgagtgtggcgaaaagggacattatgcttatgattgtcatcgttacagccggcgaagaagaagcaggtcacggtctagatcacattctcgatccagaggaaggcgatactctcgctcacgcagcaggagcaggggacgaaggtcaaggtcagcatctcctcgacgatcaagatctatctctcttcgtagatcaagatcagcttcactcagaagatctaggtctggttctataaaaggatcgaggtatttccaatccccgtcgaggtcaagatcaagatccaggtctatttcacgaccaagaagcagccgatcaaagtccagatctccatctccaaaaagaagtcgttccccatcaggaagtcctcgcagaagtgcaagtcctgaaagaatggactga

SEQ ID NO: 134 - DNA, 3309 bp, Homo sapiens
atgaaccaccagcagcagcagcagcagcagaaagcgggcgagcagcagttgagcgagcccgaggacatggagatggaagcgggagatacagatgacccaccaagaattactcagaaccctgtgatcaatgggaatgtggccctgagtgatggacacaacaccgcggaggaggacatggaggatgacaccagttggcgctccgaggcaacctttcagttcactgtggagcgcttcagcagactgagtgagtcggtccttagccctccgtgttttgtgcgaaatctgccatggaagattatggtgatgccacgcttttatccagacagaccacaccaaaaaagcgtaggattctttctccagtgcaatgctgaatctgattccacgtcatggtcttgccatgcacaagcagtgctgaagataataaattacagagatgatgaaaagtcgttcagtcgtcgtattagtcatttgttcttccataaagaaaatgattggggattttccaattttatggcctggagtgaagtgaccgatcctgagaaaggatttatagatgatgacaaagttacctttgaagtctttgtacaggcggatgctccccatggagttgcgtgggattcaaagaagcacacaggctacgtcggcttaaagaatcagggagcgacttgttacatgaacagcctgctacagacgttatttttcacgaatcagctacgaaaggctgtgtacatgatgccaaccgagggggatgattcgtctaaaagcgtccctttagcattacaaagagtgttctatgaattacagcatagtgataaacctgtaggaacaaaaaagttaacaaagtcatttgggtgggaaactttagatagcttcatgcaacatgatgttcaggagctttgtcgagtgttgctcgataatgtggaaaataagatgaaaggcacctgtgtagagggcaccatacccaaattattccgcggcaaaatggtgtcctatatccagtgtaaagaagtagactatcggtctgatagaagagaagattattatgatatccagctaagtatcaaaggaaagaaaaatatatttgaatcatttgtggattatgtggcagtagaacagctcgatggggacaataaatacgacgctggggaacatggcttacaggaagcagagaaaggtgtgaaattcctaacattgccaccagtgttacatctacaactgatgagatttatgtatgaccctcagacggaccaaaatatcaagatcaatgataggtttgaattcccagagcagttaccacttgatgaatttttgcaaaaaacagatcctaaggaccctgcaaattatattcttcatgcagtcctggttcatagtggagataatcatggtggacattatgtggtttatctaaaccccaaaggggatggcaaatggtgtaaatttgatgacgacgtggtgtcaaggtgtactaaagaggaagcaattgagcacaattatgggggtcacgatgacgacctgtctgttcgacactgcactaatgcttacatgttagtctacatcagggaatcaaaactgagtgaagttttacaggcggtcaccgaccatgatattcctcagcagttggtggagcgattacaagaagagaaaaggatcgaggctcagaagcggaaggagcggcaggaagcccatctctatatgcaagtgcagatagtcgcagaggaccagttttgtggccaccaagggaatgacatgtacgatgaagaaaaagtgaaatacactgtgttcaaagtattgaagaactcctcgcttgctgagtttgttcagagcctctctcagaccatgggatttccacaagatcaaattcgattgtggcccatgcaagcaaggagtaatggaacaaaacgaccagcaatgttagataatgaagccgacggcaataaaacaatgattgagctcagtgataatgaaaacccttggacaatattcctggaaacagttgatcccgagctggctgctagtggagcgaccttacccaagtttgataaagatcatgatgtaatgttatttttgaagatgtatgatcccaaaacgcggagcttgaattactgtgggcatatctacacaccaatatcctgtaaaatacgtgacttgctcccagttatgtgtgacagagcaggatttattcaagatactagccttatcctctatgaggaagttaaaccgaatttaacagagagaattcaggactatgacgtgtctcttgataaagcccttgatgaactaatggatggtgacatcatagtatttcagaaggatgaccctgaaaatgataacagtgaattacccaccgcaaaggagtatttccgagatctctaccaccgcgttgatgtcattttctgtgataaaacaatccctaatgatcctggatttgtggttacgttatcaaatagaatgaattattttcaggttgcaaagacagttgcacagaggctcaacacagatccaatgttgctgcagtttttcaagtctcaaggttatagggatggcccaggtaatcctcttagacataattatgaaggtactttaagagatcttctacagttcttcaagcctagacaacctaagaaactttactatcagcagcttaagatgaaaatcacagactttgagaacaggcgaagttttaaatgtatatggttaaacagccaatttagggaagaggaaataacactatatccagacaagcatgggtgtgtccgggacctgttagaagaatgtaaaaaggccgtggagcttggggagaaagcatcagggaaacttaggctgctagaaattgtaagctacaaaatcattggtgttcatcaagaagatgaactattagaatgtttatctcctgcaacgagccggacgtttcgaatagaggaaatccctttggaccaggtggacatagacaaagagaatgagatgcttgtcacagtggcgcatttccacaaagaggtcttcggaacgttcggaatcccgtttttgctgaggatacaccagggcgagcattttcgagaagtgatgaagcgaatccagagcctgctggacatccaggagaaggagtttgagaagtttaaatttgcaattgtaatgatgggccgacaccagtacataaatgaagacgagtatgaagtaaatttgaaagactttgagccacagcccggtaatatgtctcatcctcggccttggctagggctcgaccacttcaacaaagccccaaagaggagtcgctacacttaccttgaaaaggccattaaaatccataactga

SEQ ID NO: 135 - DNA, 834 bp, Homo sapiens
atgtcggcgccggcggccaaagtcagtaaaaaggagctcaactccaaccacgacggggccgacgagacctcagaaaaagaacagcaagaagcgattgaacacattgatgaagtacaaaatgaaatagacagacttaatgaacaagccagtgaggagattttgaaagtagaacagaaatataacaaactccgccaaccattttttcagaagaggtcagaattgatcgccaaaatcccaaatttttgggtaacaacatttgtcaaccatccacaagtgtctgcactgcttggggaggaagatgaagaggcactgcattatttgaccagagttgaagtgacagaatttgaagatattaaatcaggttacagaatagatttttattttgatgaaaatccttactttgaaaataaagttctctccaaagaatttcatctgaatgagagtggtgatccatcttcgaagtccaccgaaatcaaatggaaatctggaaaggatttgacgaaacgttcgagtcaaacgcagaataaagccagcaggaagaggcagcatgaggaaccagagagcttctttacctggtttactgaccattctgatgcaggtgctgatgagttaggagaggtcatcaaagatgatatttggccaaacccattacagtactacttggttcccgatatggatgatgaagaaggagaaggagaagaagatgatgatgatgatgaagaggaggaaggattagaagatattgacgaagaaggggatgaggatgaaggtgaagaagatgaagatgatgatgaaggggaggaaggagaggaggatgaaggagaagatgactaa

SEQ ID NO: 136 - DNA, 561 bp, Homo sapiens
atggcgggtctgactgacttgcagcggctacaggcccgagtggaagagctggagcgctgggtgtacgggccgggcggggcgcgcggctcacggaaggtggctgacggcctggtcaaggtgcaggtggctttggggaacatttccagcaagagggagagggtgaagattctctacaaaaagattgaagatctgatcaagtacctggatcctgagtacatcgaccgcattgccatacctgatgcctctaagctgcaattcatcctagcagaggagcagtttatcctttcccaggttgcactcctggagcaggtgaatgccttggtgcccatgctggacagtgctcacatcaaagccgttcctgagcatgctgcccgcctgcagcgcttggcccagatccacattcagcagcaggaccagtgtgtggaaatcactgaggagtccaaggctctcctggaggaatacaacaagactacaatgcttctctccaagcaattcgtgcagtgggatgagctactttgccagctagaggccgccacgcaagtgaagccagcagaggagtga

SEQ ID NO: 137 - DNA, 2892 bp, Homo sapiens
atggcgactgcggccgaaacctcggcttcagaacccgaggctgagtccaaggctgggcccaaggctgacggagaggaggatgaggttaaggcggctaggacaaggaggaaggtgttatcgcgggctgtggccgctgcgacatacaagaccatggggccagcgtgggatcagcaggaggaaggcgtgagcgagagcgatggggatgagtacgccatggcttcctccgcggagagctcccccggggagtacgagtgggaatatgacgaagaggaggagaaaaaccagctggagattgagagactggaggagcagttgtctatcaacgtctatgactacaactgccatgtggacttgatcagactgctcaggctggaaggggagcttaccaaggtgaggatggcccgccagaagatgagtgaaatctttcccttgactgaagagctctggctggagtggctgcatgacgagatcagcatggcccaggatggcctggacagagagcacgtgtatgacctctttgagaaagccgtgaaggattacatttgtcctaacatttggctagagtatggccagtactcagttggtgggattggtcagaaaggtggccttgagaaagttcgctccgtgtttgaaagggctctctcgtctgttggtttacatatgaccaaaggactcgccctctgggaggcttaccgagagtttgaaagtgcgattgtggaagctgctcggcttgagaaagtccacagtcttttccggcgacagttggcgatcccactctatgatatggaggccacatttgcagagtatgaagaatggtcagaagacccaataccagagtcagtaattcagaactataacaaagcactacagcagctggagaaatataaaccctatgaagaagcactgttgcaggcagaggcaccaaggctggcagaatatcaagcatatatcgattttgagatgaaaattggcgatcctgctcgcattcagttgatctttgagcgcgccctggtcgagaactgccttgtcccagacttatggatccgttacagtcagtacctagatcgacaactgaaagtaaaggatttggttttatctgtacataaccgcgctattagaaactgcccctggacagttgccttatggagtcggtacctcttggccatggagagacatggagttgatcatcaagtaatttctgtaaccttcgagaaagctttgaatgccggcttcatccaggccactgattatgtggagatttggcaggcataccttgattacctgaggagaagggttgatttcaaacaagactccagtaaagagctggaggagttgagggccgcctttactcgtgccttggagtatctgaagcaggaggtggaagagcgtttcaatgagagtggtgatccaagctgcgtgattatgcagaactgggctaggattgaggctcgactgtgcaataacatgcagaaagctcgggaactctgggatagcatcatgaccagaggaaatgccaagtacgccaacatgtggctagagtattacaacctggaaagagctcatggtgacacccagcactgccggaaggctctgcaccgggccgtccagtgcaccagtgactacccagagcacgtctgcgaagtgttactcaccatggagaggacagaaggttctttagaagattgggatatagctgttcagaaaactgaaacccgattagctcgtgtcaatgagcagagaatgaaggctgcagagaaggaagcagcccttgtgcagcaagaagaagaaaaggctgaacaacggaaaagagctcgggctgagaagaaagcgttaaaaaagaagaaaaagatcagaggcccagagaagcgcggagcagatgaggatgatgagaaagagtggggcgatgatgaagaagagcagccttccaaacgcagaagggtcgagaacagcatccctgcagctggagaaacacaaaatgtagaagtagcagcagggcccgctgggaaatgtgctgccgtagatgtggagcccccttcgaagcagaaggagaaggcagcctccctgaagagggacatgcccaaggtgctgcacgacagcagcaaggacagcatcaccgtctttgtcagcaacctgccctacagcatgcaggagccggacacgaagctcaggccactcttcgaggcctgtggggaggtggtccagatccgacccatcttcagcaaccgtggggatttccgaggttactgctacgtggagtttaaagaagagaaatcagcccttcaggcactggagatggaccggaaaagtgtagaagggaggccaatgtttgtttccccctgtgtggataagagcaaaaaccccgattttaaggtgttcaggtacagcacttccctagagaaacacaagctgttcatctcaggcctgcctttctcctgtactaaagaggaactagaagaaatctgtaaggctcatggcaccgtgaaggacctcaggctggtcaccaaccgggctggcaaaccaaagggcctggcctacgtggagtatgaaaatgaatcccaggcgtcgcaggctgtgatgaagatggacggcatgactatcaaagagaacatcatcaaagtggcaatcagcaaccctcctcagaggaaagttccagagaagccggagaccaggaaggcaccaggtggccccatgcttttgccgcagacatacggagcgagggggaagggaaggacgcagctgtctctactgcctcgtgccctgcagcgcccaagtgctgcagctcctcaggctgagaacggccctgccgcggctcctgcagttgccgccccagcagccaccgaggcacccaagatgtccaatgccgattttgccaagctgtttctgagaaagtga

SEQ ID NO: 138 - DNA, 423 bp, Homo sapiens
atggccggttggcagagctacgtggataacctgatgtgcgatggctgctgccaggaggccgccattgtcggctactgcgacgccaaatacgtctgggcagccacggccgggggcgtctttcagagcattacgccaatagaaatagatatgattgtaggaaaagaccgggaaggtttctttaccaacggtttgactcttggcgcgaagaaatgctcagtgatcagagatagtctatacgtcgatggtgactgcacaatggacatccggacaaagagtcaaggtggggagccaacatacaatgtggctgtcggcagagctggtagagtcttggtctttgtaatgggaaaagaaggggtccatggaggcggattgaataagaaggcatactcaatggcaaaatacttgagagactctgggttctag

SEQ ID NO: 139 - DNA, 1020 bp, Homo sapiens
atgtctactgttcacgaaatcctgtgcaagctcagcttggagggtgatcactctacacccccaagtgcatatgggtctgtcaaagcctatactaactttgatgctgagcgggatgctttgaacattgaaacagccatcaagaccaaaggtgtggatgaggtcaccattgtcaacattttgaccaaccgcagcaatgcacagagacaggatattgccttcgcctaccagagaaggaccaaaaaggaacttgcatcagcactgaagtcagccttatctggccacctggagacggtgattttgggcctattgaagacacctgctcagtatgacgcttctgagctaaaagcttccatgaaggggctgggaaccgacgaggactctctcattgagatcatctgctccagaaccaaccaggagctgcaggaaattaacagagtctacaaggaaatgtacaagactgatctggagaaggacattatttcggacacatctggtgacttccgcaagctgatggttgccctggcaaagggtagaagagcagaggatggctctgtcattgattatgaactgattgaccaagatgctcgggatctctatgacgctggagtgaagaggaaaggaactgatgttcccaagtggatcagcatcatgaccgagcggagcgtgccccacctccagaaagtatttgataggtacaagagttacagcccttatgacatgttggaaagcatcaggaaagaggttaaaggagacctggaaaatgctttcctgaacctggttcagtgcattcagaacaagcccctgtattttgctgatcggctgtatgactccatgaagggcaaggggacgcgagataaggtcctgatcagaatcatggtctcccgcagtgaagtggacatgttgaaaattaggtctgaattcaagagaaagtacggcaagtccctgtactattatatccagcaagacactaagggcgactaccagaaagcgctgctgtacctgtgtggtggagatgactga

SEQ ID NO: 140 - DNA, 1116 bp, Homo sapiens
atgtcattccgtaaagtaaacatcatcatcttggtcctggctgttgctctcttcttactggttttgcaccataacttcctcagcttgagcagtttgttaaggaatgaggttacagattcaggaattgtagggcctcaacctatagactttgtcccaaatgctctccgacatgcagtagatgggagacaagaggagattcctgtggtcatcgctgcatctgaagacaggcttgggggggccattgcagctataaacagcattcagcacaacactcgctccaatgtgattttctacattgttactctcaacaatacagcagaccatctccggtcctggctcaacagtgattccctgaaaagcatcagatacaaaattgtcaattttgaccctaaacttttggaaggaaaagtaaaggaggatcctgaccagggggaatccatgaaacctttaacctttgcaaggttctacttgccaattctggttcccagcgcaaagaaggccatatacatggatgatgatgtaattgtgcaaggtgatattcttgccctttacaatacagcactgaagccaggacatgcagctgcattttcagaagattgtgattcagcctctactaaagttgtcatccgtggagcaggaaaccagtacaattacattggctatcttgactataaaaaggaaagaattcgtaagctttccatgaaagccagcacttgctcatttaatcctggagtttttgttgcaaacctgacggaatggaaacgacagaatataactaaccaactggaaaaatggatgaaactcaatgtagaagagggactgtatagcagaaccctggctggtagcatcacaacacctcctctgcttatcgtattttatcaacagcactctaccatcgatcctatgtggaatgtccgccaccttggttccagtgctggaaaacgatattcacctcagtttgtaaaggctgccaagttactccattggaatggacatttgaagccatggggaaggactgcttcatatactgatgtttgggaaaaatggtatattccagacccaacaggcaaattcaacctaatccgaagatataccgagatctcaaacataaagtga

SEQ ID NO: 141 - DNA, 480 bp, Homo sapiens
atggctttagagacgatctgccgaccctctgggagaaaatccagcaagatgcaagccttcagaatctgggatgttaaccagaagaccttctatctgaggaacaaccaactagttgctggatacttgcaaggaccaaatgtcaatttagaagaaaagatagatgtggtacccattgagcctcatgctctgttcttgggaatccatggagggaagatgtgcctgtcctgtgtcaagtctggtgatgagaccagactccagctggaggcagttaacatcactgacctgagcgagaacagaaagcaggacaagcgcttcgccttcatccgctcagacagtggccccaccaccagttttgagtctgccgcctgccccggttggttcctctgcacagcgatggaagctgaccagcccgtcagcctcaccaatatgcctgacgaaggcgtcatggtcaccaaattctacttccaggaggacgagtag

SEQ ID NO: 142 - DNA, 834 bp, Homo sapiens
atggcggcagatggagagcgttccccgctgctgtctgagcccatcgacggtggcgcgggcggcaacggtttagtggggcccggcgggagtggggctgggcccgggggaggcctgaccccctccgcaccaccgtacggagccgcatttcccccgtttcccgaggggcatccagccgtgttgcctggggaggacccacccccctattcacccttaactagcccggacagtgggagtgcccctatgatcacctgccgagtctgccaatctctcatcaacgtggaaggcaagatgcatcagcatgtagtcaaatgtggtgtctgcaatgaagccaccccaatcaagaatgcacccccagggaaaaaatatgttcgatgcccctgtaactgtctccttatctgcaaagtgacatcccaacggattgcatgccctcggccctactgcaaaagaatcatcaacctggggcctgtgcatcccggacctctgagtccagaaccccaacccatgggtgtcagggttatctgtggacattgcaagaatacttttctgtggacagagttcacagaccgcactttggcacgttgtcctcactgcaggaaagtgtcatctattgggcgcagatacccacgtaagagatgtatctgctgcttcttgcttggcttgcttttggcagtcactgccactggccttgcctttggcacatggaagcatgcacggcgatatggaggcatctatgcagcctgggcatttgtcatcctgttggctgtgctgtgtttgggccgggctctttattgggcctgtatgaaggtcagccaccctgtccagaacttctcctga

SEQ ID NO: 143 - DNA, 1689 bp, Homo sapiens
atggatccgcagcctcctccacccgcccagggcagcccacctcaccgtggccgaggccggggccgtggccgaggccgtggtcggggccgtggccgtggcagggggggcgctggagcccctagggcgcccctgccctgccccacctgcggccgcctcttccgtttcccctactacctctcccggcaccggctgagccactcggggctccggccccacgcctgcccgctgtgccccaaggccttccgccggccggcccacctttcccgccacctgcgcggccacgggccccagcccccgctgcgctgcgccgcctgcccccgcaccttcccagaaccggcccagctcaggcgccacctggctcaggagcacgcgggcggcgaggtcgagctggccatcgagagggtggccaaggagacggccgaacccagctggggcccgcaggacgagggctcggagccgcccaccaccgctgcagcaggggccacggaggaggaggcggtcgcagcgtggcctgagacgtggcctgcgggggagccttccacgctggctgcgcccaccagcgccgcggagccccgggagtcggagtcggaggaggccgaggccggggcagcagagctgagggccgagctggcgctggcggccgggcggcaggaggagaaacaggtcctgctccaggcagactggacgctgctgtgtctgcgctgccgcgaagccttcgccaccaagggcgagctcaaggcgcacccgtgtctgcgccccgagggcgaacaggaaggggaaggggggcccccgccacgccccaagcgacaccagtgctccatctgcctcaaggccttcgccaggccctggtccctgtcgcgccaccggctggtccactccaccgaccgccctttcgtgtgcccagactgcggcctggccttccgcctcgcctcctacctccgccagcaccgccgcgtccacggccccctcagcctgctggccccgctgcccgcggcgggcaagaaggacgacaaggcctcgggtgcacggaactcagccaaggggccggaggggggcgagggggcggagtgcgggggtgcctcggaagggggagaagggcagaacggaggcgacgccgccccggctcggccccccgccggggagccccgcttctggtgcccagagtgcggcaaaggtttcaggcgccgggcgcacctgcggcagcacggggtgacccactcgggagcgcgccccttccagtgcgtgcgctgccagcgggagttcaagcgcctggccgacctggcgcgccacgcacaggtgcacgcggggggcccagccccgcacccgtgcccccgctgcccgcgccgcttctcgcgcgcctacagcctcctgcgccaccagcgctgccaccgcgcagagctggagagggccgccgcgctgcaggcactgcaggcccaggccccgacgtcgccgccaccgcccccgccgcccctgaaggccgagcaggaggaagaagggctcccgctgcccctcgcaaacattaaggaagagccgccctctccggggaccccaccccagtccccgccggctccccctgtcttcctcagcgcctcctgtttcgacagccaagaccactcagccttcgagatggaggaggaagaggtagacagcaaggctcacctgcgcgggctggggggcctggcctcctga

SEQ ID NO: 144 - DNA, 1896 bp, Homo sapiens
atggccgctgcggccggggacggcacggtgaagccgctgcagagcgccatgaagcttgccaacggggccatcgagctggacaccggcaaccggccccgggaggcatacacggaatacctgaggagcatccactatatctcccaggtgttactagaagaagtggaaaccactaaagaagctggggaaactgtgccccccgacacctccaagatgctgaagctagcacagcagtgtctggagagggcccagtcgacggccgccaagcttgggaaaacacgcctgaagccaaccatgcctgcagctgctcccattccccagcctgccggccgacaccgccgtgtatactccgatgaaggaggaaagctctctccttttctgccacccgagatcttccagaagcttcagggggcagagtcacaaagctgtaagaaagagctgacgccactggaggaggcctccctgcagaatcagaagctgaaggctgcgtatgaggcccgaatggcgcggctagaccccagccaggccatgcagaagacatccctgaccctctctctacagcggcagatgatggagaacctagtgattgccaaagcccgggaggagacactccagagaaagatggaggagcgccggctgcggctccaggaggccgccaacaggaggttttgcagccaagtcgccctgaccccggaggaacgggagcagcgggccctttacgccgccatcctggagtacgaacaggaccatgactggccgaagcactggaaggccaagctcaagaggaatccgggggacctgtcactcgtgaccagcctggtctcacacctgctcagcctccccgaccacccgatcgcgcagctcctgaggcggctgcagtgctccgtgtacagcgccctgtatcccgccgtgagcagagcagccgcgccagccccaggctgctgccccccgacccccaaccccggaagccgacggctgcggccctcgcagagcctccattgcatgctgtccccgcccgagcccagcgcagccccgcggccccaggacagtccccccacgcccccactccaacccggccccgtggggtctccctcacccctgggggacaccgcatctggattgccagacaaggacagctcgttcgaggacctggagcagttcctggggacgtctgagcggcagggccggggccgtggggtacagccggagccccagctgcagcagctgaagaccgcggtggaggagatccacaatgccgtagacaggctgctctcgctgacccttctggccttcgaaggcctaaacacagctgcctccaaggaccgctgcctggcctgcattgaggaaccctttttctccccgctgtggcctctgctgctggccctgtacaggagcgtgcaccgagcccgggaggctgccctgagcaggagcatggagctctacaggaatgcaccccccaccgccattggcatccccaccaagctcctcccccagaaccctgaggccaagggggccactggctacccctactgcgcggcggcccaggagctcggactgctggtcctggagagctgcccccagaagaagctggagtgcatagtgcggaccctgcggatcatctgtgtctgtgcggaagactactgccccaccccagaggccacaccccaggccgggcccccgcccatcgctgcagctgccattggtgccgatgacctgctgcccatcctgtccttcgtggtgctgaggagcggcctccctcagctggtgtcggagtgcgcggccctggaggagttcatccacgaggggtacctgatcggagaggagggctactgcctcacatcactgcagagtgccctgagctacgtggagctgctgccccggggaggcctggccaagtag

SEQ ID NO: 145 - DNA, 6987 bp, Homo sapiens
atgacatcggccacagagtttgaaaatgtgggcaaccagccaccttacagcaggatcaatgcccgctgggacgccccagacgacgagctggataatgacaacagctcagccaggctctttgagaggtcccggataaaggccttggcagatgagcgggaagttgttcagaaaaagaccttcacgaaatgggtgaactcgcacctggctcgagtgtcctgccgcatcaccgatctctacaaggacctgcgggatgggcgcatgctcatcaagctgctggaggtgctctctggagagatgctgccaaagcccaccaaggggaagatgcgcatccactgcctggagaatgtggacaaggctctccagttcctcaaggagcagcgtgtacacctggagaacatgggctcccacgacattgtagatggcaaccaccgcctggtcctgggcctcatctggaccatcatcctccgcttccagattcaggacattgtggtccaaactcaggaaggtcgtgaaacacgctcagccaaggatgcgttgctgttgtggtgtcagatgaagacggcaggctaccctcatgttaatgtcaccaactttacctccagctggaaggatggcttggcctttaatgccctgatacacaagcaccggcccgacctgatcgactttgataagctgaaggactccaatgcccggcacaacctggagcacgcattcaatgtggctgagcgccagctgggcatcatcccgctcctcgaccccgaagatgtctttacggaaaaccctgatgagaaatccatcatcacctatgtggtggccttttaccactacttctccaagatgaaggtgctggcagtggagggcaagcgtgtcggcaaggttattgaccatgccattgagactgagaagatgattgaaaagtacagcgggctagcctcggacctgctcacctggatcgagcagaccatcactgtcctgaacagccgcaagtttgccaactcgctgacgggcgtccagcagcagctgcaggccttcagcacctaccgcaccgtggagaagccgcccaagtttcaagagaaggggaatctggaagttctactttttaccatccagtcccggatgagagccaacaatcagaaagtgtacacaccccacgatgggaaactagtgtctgacatcaacagggcctgggaaagcctggaggaagctgagtatcggcgggagctggccctgagaaatgagctcattcggcaggagaagctagagcaactggcccggcgctttgaccggaaggccgcaatgagagagacctggctcagtgaaaaccagcgcctcgtggcccaggataactttgggtatgacctggcagctgtggaggccgccaagaagaagcatgaggccatcgagaccgacacggctgcctacgaggagcgggtgagagccctggaggacctggctcaggagctggagaaagagaactaccatgaccagaagcgcatcacggcccgcaaggacaatatactgcgcctatggagctacctgcaggagctgctgcagtcccggcgccagaggctcgagaccaccctggcactgcagaagctcttccaggacatgctgcacagcatcgactggatggatgagatcaaggctcacctcttgtctgccgagtttgggaagcacttgttggaggttgaagacctgctacagaagcacaagttgatggaagctgacatcgccatccaaggggacaaagtgaaggccatcaccgcagccaccctgaagttcaccgaggggaaagggtaccagccttgtgacccccaggtcatccaggaccgcatcagccacttggagcagtgctttgaggagctgagcaacatggcagctgggcggaaggcccaactggagcagtccaaacgactctggaagttcttctgggagatggatgaggctgagagctggatcaaggagaaggagcagatctattcttccctggactatggcaaagacctgaccagtgtgctcatcttacagcgcaagcacaaggcctttgaggatgagctccgtgggctggatgctcacctggagcagatcttccaggaggctcatggcatggttgcgcgcaagcagtttgggcacccgcagatcgaggcccgcataaaggaggtgtcggcacagtgggaccagctgaaggacctggctgccttctgcaagaagaacctccaggatgctgagaactttttccagttccagggcgatgcggatgacctgaaggcttggctgcaagacgcccaccggctgctctctggtgaagatgtggggcaggacgaaggggccacgcgggccctggggaaaaagcacaaggacttcctggaggagctggaggagagccgtggggtgatggagcacctggagcagcaggcccagggattccccgaagagtttcgggattccccagatgtgacccatcggctgcaggccctgcgggagctctaccaacaggtggtggcccaggcggacctgcgtcagcagaggctgcaggaagccctggacctgtacacggtgttcggggagacagacgcctgtgagctgtggatgggagagaaggagaagtggctggccgagatggaaatgccagacaccctggaggacctggaggtcgtgcagcacaggttcgacatcctggaccaggagatgaagaccttgatgactcagattgatggtgtgaacctcgctgccaacagcttggtagagagtggccacccacgcagcagggaggtgaagcagtaccaggaccatctgaacaccaggtggcaggcatttcagaccctggtgtcggagcggcgggaggctgtggactcagccctccgagtgcacaactactgcgtagattgcgaggagaccagcaagtggatcacggacaagacaaaggtagtggagtccacaaaagacctggggcgggacctggcaggtatcatcgccatccagaggaagttgtcagggctggagcgtgacgtggccgccatccaggcccgtgtggatgccctggagcgtgagtcccagcagctgatggactcgcaccctgagcagaaggaggatattggtcagcggcaaaaacacttggaggagctgtggcagggcctgcagcaatccctgcagggccaggaggacttgctgggggaagtcagccagctgcaggccttcctgcaggatctggatgacttccaggcctggctctccatcacccagaaggctgtggcctctgaggacatgcccgaatccctcccagaggctgagcagctcctgcagcagcatgcaggtatcaaggatgagattgacgggcaccaagacagctaccagcgtgttaaggagtctggggagaaagtgatccaaggccagacggacccagagtatctgcttctgggccagcggctggagggcctggatactggctggaatgccctgggcaggatgtgggagagccgcagccacaccctcgctcagtgccttggcttccaggagttccagaaagatgccaagcaggctgaagccatcctcagcaaccaggaatacactctggctcacttggagcccccagactccctggaagctgcagaggctgggatccggaagtttgaggatttcttggggtctatggagaacaaccgggataaggtcttgagtcctgtggactctggaaacaagctggtagctgagggaaacctatactcagacaagatcaaggagaaggtgcagctgattgaggacaggcacaggaagaacaacgagaaggcccaggaggcctctgtcctactgagagacaacctggagctacagaacttcctccagaactgccaggagctcactctctggatcaacgacaagctgctgacatctcaggatgtctcctatgatgaagcacgaaaccttcacaataaatggctaaagcaccaggcgtttgtggcagagctggcttcccatgaagggtggctagagaacatcgatgcggaaggaaagcagctgatggatgagaagccccagtttacagccctggtgtcccaaaagctggaagccctgcaccggctctgggacgagctgcaggccaccacaaaggagaagacccagcacctctcggctgccaggagctccgacctgcgcttgcagacccatgctgacctcaacaagtggatcagcgccatggaggaccagctgcggtcagacgacccgggcaaggacctgaccagtgtcaatcggatgttggctaagctgaagcgagtggaggaccaagtgaatgtgcgaaaagaggagctgggggagctgtttgcccaggtgccttcaatgggagaggagggaggagatgcagacttgagcatcgagaagcggttcctggacctcctggaacccctaggaaggaggaagaagcagctggaatcatccagagccaagctgcagatcagccgggacttagaggatgagacgctttgggtggaggagaggctgcctctggcccagtcagccgactatggcactaatctgcaaactgtgcaactgttcatgaagaagaaccagacactgcagaatgagattctgggccatacgccgcgggttgaggatgtgctgcagagagggcagcagctggtggaggcggcggagatcgactgccaggaccttgaggagcgcctggggcacctgcagagctcctgggacaggctgcgggaggcagcggccgggaggctgcagcgactgagggacgccaacgaggcacagcagtactacctggatgcagacgaggctgaggcctggattggcgagcaggagctctacgtcatctccgatgagatccccaaggatgaagagggcgccattgtgatgctgaagcgacatttgcggcagcagcgtgcggtggaggactacggccggaacatcaagcagctggccagccgggcccagggcctgctgtctgcaggccaccctgagggggaacagatcatcagacttcaggggcaagtggacaagcactacgcagggctgaaggacgtggcggaagagcgcaagcgcaagctggagaacatgtaccacctgttccagctcaagcgggagaccgacgacctggagcagtggatttcagaaaaggagctagtggcctcttccccggaaatggggcaagactttgaccacgtgactcttctgcgggacaagttccgggactttgcccgggagaccggggcgattgggcaggagcgggtggacaatgtgaatgccttcatcgagcgactcatcgacgcgggccacagcgaggcggccaccatcgccgagtggaaggacgggctgaacgagatgtgggcagacctcctggagctcattgacacgcgcatgcagctgctggccgcctcctatgacctgcaccgctacttctacacgggtgccgagatcctgggcctcatcgacgagaagcaccgcgagctgcccgaggacgtggggctggacgccagcacggccgagtccttccaccgggtgcacacagccttcgagcgggagctccacctgctgggtgtccaggtgcagcagttccaggacgtggccacccgtctgcagacagcatatgctggggagaaggcagaggccatccagaacaaggagcaggaggtgtctgccgcgtggcaggcgctgctcgatgcctgtgccgggcgccggacccagctagtggacacggcggataaattccgcttcttcagcatggcccgtgacctcctctcctggatggagagcatcatccggcagatcgagacccaggagaggcccagggatgtctcctctgtggaactgctcatgaagtatcaccagggcatcaatgcagagattgaaacccggagcaagaacttcagtgcctgcctggagcttggcgagtccctgctgcagcggcagcaccaggcctcagaggagatccgcgagaaactgcagcaggtgatgtccaggaggaaagagatgaatgagaagtgggaagcccgctgggagcggctccgcatgttgctggaggtgtgccagttctcgagggatgcctctgtggctgaggcgtggctgattgcccaggagccctacctggccagcggggactttggacacacagtggacagtgtggagaagctcatcaagaggcatgaggcttttgagaagtccacggccagctgggcagagcgctttgctgccctggagaagcccaccacgcttgagctgaaagaacgccagattgcagagagacccgcagaggagactgggcctcaagaggaggaaggcgagacagcaggggaggctccagtttcccaccatgcggccaccgagagaacgtccccgggggaagaagagggaacgtggcctcagaacctgcagcagccaccaccgccgggtcagcacaaggatgggcagaaatccactggggatgagaggcccaccacggagcccctctttaaggtcctagatacgcctctgagcgagggtgatgagcccgcaacgctgccggccccgcgggaccatgggcagagtgtgcagatggaaggctacctgggccgcaagcatgacctggaggggcccaacaagaaggcttccaacaggtcctggaacaacctgtactgtgtgctcaggaacagtgagctaaccttctacaaggatgccaagaacctggccctggggatgccctaccatggggaggaacccctggccctgagacatgccatctgtgagattgctgccaactacaagaagaagaagcacgtctttaagctgaggctgagtaatggcagcgagtggctcttccatggcaaggatgaggaggagatgctgtcctggctgcagggcgtgagcaccgccatcaacgagtcccagagcatccgcgtcaaggcgcagagcctgcccctgccttccctctccggccccgacgccagcctcggcaagaaagacaaggagaagagattcagcttcttccccaaaaagaagtag

SEQ ID NO: 146 - DNA, 2196 bp, Homo sapiens
atggtggtggaacaccccgagttcctcaaggcagggaaggagcctggcctgcagatctggcgtgtggagaagttcgatctggtgcccgtgcccaccaacctttatggagacttcttcacgggcgacgcctacgtcatcctgaagacagtgcagctgaggaacggaaatctgcagtatgacctccactactggctgggcaatgagtgcagccaggatgagagcggggcggccgccatctttaccgtgcagctggatgactacctgaacggccgggccgtgcagcaccgtgaggtccagggcttcgagtcggccaccttcctaggctacttcaagtctggcctgaagtacaagaaaggaggtgtggcatcaggattcaagcacgtggtacccaacgaggtggtggtgcagagactcttccaggtcaaagggcggcgtgtggtccgtgccaccgaggtacctgtgtcctgggagagcttcaacaatggcgactgcttcatcctggacctgggcaacaacatccaccagtggtgtggttccaacagcaatcggtatgaaagactgaaggccacacaggtgtccaagggcatccgggacaacgagcggagtggccgggcccgagtgcacgtgtctgaggagggcactgagcccgaggcgatgctccaggtgctgggccccaagccggctctgcctgcaggtaccgaggacaccgccaaggaggatgcggccaaccgcaagctggccaagctctacaaggtctccaatggtgcagggaccatgtccgtctccctcgtggctgatgagaaccccttcgcccagggggccctgaagtcagaggactgcttcatcctggaccacggcaaagatgggaaaatctttgtctggaaaggcaagcaggcaaacacggaggagaggaaggctgccctcaaaacagcctctgacttcatcaccaagatggactaccccaagcagactcaggtctcggtccttcctgagggcggtgagaccccactgttcaagcagttcttcaagaactggcgggacccagaccagacagatggcctgggcttgtcctacctttccagccatatcgccaacgtggagcgggtgcccttcgacgccgccaccctgcacacctccactgccatggccgcccagcacggcatggatgacgatggcacaggccagaaacagatctggagaatcgaaggttccaacaaggtgcccgtggaccctgccacatatggacagttctatggaggcgacagctacatcattctgtacaactaccgccatggtggccgccaggggcagataatctataactggcagggtgcccagtctacccaggatgaggtcgctgcatctgccatcctgactgctcagctggatgaggagctgggaggtacccctgtccagagccgtgtggtccaaggcaaggagcccgcccacctcatgagcctgtttggtgggaagcccatgatcatctacaagggcggcacctcccgcgagggcgggcagacagcccctgccagcacccgcctcttccaggtccgcgccaacagcgctggagccacccgggctgttgaggtattgcctaaggctggtgcactgaactccaacgatgcctttgttctgaaaaccccctcagccgcctacctgtgggtgggtacaggagccagcgaggcagagaagacgggggcccaggagctgctcagggtgctgcgggcccaacctgtgcaggtggcagaaggcagcgagccagatggcttctgggaggccctgggcgggaaggctgcctaccgcacatccccacggctgaaggacaagaagatggatgcccatcctcctcgcctctttgcctgctccaacaagattggacgttttgtgatcgaagaggttcctggtgagctcatgcaggaagacctggcaacggatgacgtcatgcttctggacacctgggaccaggtctttgtctgggttggaaaggattctcaagaagaagaaaagacagaagccttgacttctgctaagcggtacatcgagacggacccagccaatcgggatcggcggacgcccatcaccgtggtgaagcaaggctttgagcctccctcctttgtgggctggttccttggctgggatgatgattactggtctgtggaccccttggacagggccatggctgagctggctgcctga

SEQ ID NO: 147 - DNA, 2895 bp, Homo sapiens
atggatgaacagagcgtggagagcattgctgaggttttccgatgtttcatttgtatggagaaattgcgggatgcacgcctgtgtcctcattgctccaaactgtgttgtttcagctgtattaggcgctggctgacagagcagagagctcaatgtcctcattgccgtgctccactccagctacgagaactagtaaattgtcgttgggcagaagaagtaacacaacagcttgatactcttcaactctgcagtctcaccaaacatgaagaaaatgaaaaggacaaatgtgaaaatcaccatgaaaaacttagtgtattttgctggacttgtaagaagtgtatctgccatcagtgtgcactttggggaggaatgcatggcggacatacctttaaacctttggcagaaatttatgagcaacacgtcactaaagtgaatgaagaggtagccaaacttcgtcggcgtctcatggaactgatcagcttagttcaagaagtggaaaggaatgtagaagctgtaagaaatgcaaaagatgagcgtgttcgggaaattaggaatgcagtggagatgatgattgcacggttagacacacagctgaagaataagcttataacactgatgggtcagaagacatctctaacccaagaaacagagcttttggaatccttacttcaggaggtggagcaccagttgcggtcttgtagtaagagtgagttgatatctaagagctcagagatccttatgatgtttcagcaagttcatcggaagcccatggcatcttttgttaccactcctgttccaccagactttaccagtgaattagtgccatcttacgattcagctacttttgttttagagaatttcagcactttgcgtcagagagcagatcctgtttacagtccacctcttcaagtttcaggactttgctggaggttaaaagtttacccagatggaaatggagttgtgcgaggttactacttatctgtgtttctggagctctcagctggcttgcctgaaacttctaaatatgaatatcgtgtagagatggttcaccagtcctgtaatgatcctacaaaaaatatcattcgagaatttgcatctgactttgaagttggagaatgctggggctataatagatttttccgtttggacttactcgcaaatgaaggatacttgaatccacaaaatgatacagtgattttaaggtttcaggtacgttcaccaactttctttcaaaaatcccgggaccagcattggtacattactcagttggaagctgcacagactagttatatccaacaaataaacaaccttaaagagagacttactattgagctgtctcgaactcagaagtcaagagatttgtcaccaccagataaccatcttagcccccaaaatgatgatgctctggagacacgagctaagaagtctgcatgctctgacatgcttctcgaaggtggtcctactacagcttctgtaagagaggccaaagaggatgaagaagatgaggagaagattcagaatgaagattatcatcacgagctttcagatggagatctggatctggatcttgtttatgaggatgaagtaaatcagctcgatggcagcagttcctctgctagttccacagcaacaagtaatacagaagaaaatgatattgatgaagaaactatgtctggagaaaatgatgtggaatataacaacatggaattagaagagggagaactcatggaagatgcagctgctgcaggacccgcaggtagtagccatggttatgtgggttccagtagtagaatatcaagaagaacacatttatgctccgctgctaccagtagtttactagacattgatccattaattttaatacatttgttggaccttaaggaccggagcagtatagaaaatttgtggggcttacagcctcgcccacctgcttcacttctgcagcccacagcatcatattctcgaaaagataaagaccaaaggaagcaacaggcaatgtggcgagtgccctctgatttaaagatgctaaaaagactcaaaactcaaatggccgaagttcgatgtatgaaaactgatgtaaagaatacactttcagaaataaaaagcagcagtgctgcttctggagacatgcagacaagccttttttctgctgaccaggcagctctggctgcatgtggaactgaaaactctggcagattgcaggatttgggaatggaactcctggcaaagtcatcagttgccaattgttacatacgaaactccacaaataagaagagtaattcgcccaagccagctcgatccagtgtagcaggtagtctatcacttcgaagagcagtggaccctggagaaaatagtcgttcaaagggagactgtcagactctgtctgaaggctccccaggaagctctcagtctgggagcaggcacagttctccccgagccttgatacatggcagtatcggtgatattctgccaaaaactgaagaccggcagtgtaaagctttggattcagatgctgttgtggttgcagttttcagtggcttgcctgcggttgagaaaaggaggaaaatggtcaccttgggggctaatgctaaaggaggtcatctggaaggactgcagatgactgatttggaaaataattctgaaactggagagttacagcctgtactacctgaaggagcttcagctgcccctgaagaaggaatgagtagcgacagtgacattgaatgtgacactgagaatgaggagcaggaagagcataccagtgtgggcgggtttcacgactccttcatggtcatgacacagcccccggatgaagatacacattccagttttcctgatggtgaacaaataggccctgaagatctcagcttcaatacagatgaaaatagtggaaggtaa

SEQ ID NO: 148 - DNA, 1041 bp, Homo sapiens
atggagtccgtcagttgctccgctgctgctgtcaggaccggagacatggagtcccagcgggacctgagcctggtgcctgagcggcttcagagacgcgaacaagaacggcagctggaagttgaaaggcggaaacaaaagcggcagaaccaggaggtagagaaggagaacagccactttttcgtcgccacctttgctcgggagcgagcggccgtggaagagcttctggagcgcgcggagtcggtcgagcggctggaggaggcggcctctcggctccaggggctgcagaaactaatcaacgactcagtttttttcctagccgcttacgacctgcggcagggacaagaggcgctggcgcggctgcaggcggccttggccgagcggcgccgggggctgcagcccaagaagcgtttcgctttcaagacccggggaaaggatgctgcttcgtctaccaaagtagacgcggctcctggcatccccccggcagttgaaagcatacaggactccccgctgcccaagaaggcggaaggagacctcggccccagctgggtctgcggtttctccaacctggagtcccaagtcttggagaagagagccagcgagttgcaccagcgcgacgttcttttgaccgaactgagcaactgcacggtcagactgtatggaaatcccaacaccctgcggctaaccaaggcccacagctgcaagctgctctgcggtccggtgtctacctctgttttcctggaggactgcagtgactgcgtgctggcagtggcctgccaacagctccgcatacacagtacgaaagacacccgcatcttcctgcaggtgaccagcagggccatcgtggaggactgcagtgggatccagttcgccccttacacctggagctacccggagatcgacaaggacttcgagagctctggtttagataggagcaaaaataactggaacgatgttgacgattttaactggctggcccgggatatggcctccccaaactggagtattcttcctgaagaggagcgaaatatccagtgggactaa

SEQ ID NO: 149 - DNA, 1137 bp, Homo sapiens
atggtggactacagcgtgtgggaccacattgaggtgtctgatgatgaagacgagacgcaccccaacatcgacacggccagtctcttccgctggcggcatcaggcccgggtggaacgcatggagcagttccagaaggagaaggaggaactggacaggggctgccgcgagtgcaagcgcaaggtggccgagtgccagaggaaactgaaggagctggaggtggccgagggcggcaaggcagagctggagcgcctgcaggccgaggcacagcagctgcgcaaggaggagcggagctgggagcagaagctggaggagatgcgcaagaaggagaagagcatgccctggaacgtggacacgctcagcaaagacggcttcagcaagagcatggtaaataccaagcccgagaagacggaggaggactcagaggaggtgagggagcagaaacacaagaccttcgtggaaaaatacgagaaacagatcaagcactttggcatgcttcgccgctgggatgacagccaaaagtacctgtcagacaacgtccacctggtgtgcgaggagacagccaattacctggtcatttggtgcattgacctagaggtggaggagaaatgtgcactcatggagcaggtggcccaccagacaatcgtcatgcaatttatcctggagctggccaagagcctaaaggtggacccccgggcctgcttccggcagttcttcactaagattaagacagccgatcgccagtacatggagggcttcaacgacgagctggaagccttcaaggagcgtgtgcggggccgtgccaagctgcgcatcgagaaggccatgaaggagtacgaggaggaggagcgcaagaagcggctcggccccggcggcctggaccccgtcgaggtctacgagtccctccctgaggaactccagaagtgcttcgatgtgaaggacgtgcagatgctgcaggacgccatcagcaagatggaccccaccgacgcaaagtaccacatgcagcgctgcattgactctggcctctgggtccccaactctaaggccagcgaggccaaggagggagaggaggcaggtcctggggacccattactggaagctgttcccaagacgggcgatgagaaggatgtcagtgtgtga

SEQ ID NO: 150 - DNA, 687 bp, Homo sapiens
atggcggacttcgacacctacgacgatcgggcctacagcagcttcggcggcggcagagggtcccgcggcagtgctggtggccatggttcccgtagccagaaggagttgcccacagagcccccctacacagcatacgtaggaaatctacctttcaatacggttcagggcgacatagatgctatctttaaggatctcagcataaggagtgtacggctagtcagagacaaagacacagataaatttaaaggattctgctatgtagaattcgatgaagtggattcccttaaggaagccttgacatacgatggtgcactgttgggcgatcggtcacttcgtgtggacattgcagaaggcagaaaacaagataaaggtggctttggattcagaaaaggtggaccagatgacagaggcttcagggatgacttcttagggggcaggggaggtagtcgcccaggcgaccggcgaacaggcccccccatgggcagccgcttcagagatggccctcccctccgtggatccaacatggatttcagagaacccacagaagaggaaagagcacagagaccacgactccagcttaaacctcgaacagtcgcgacgcccctcaatcaagtagccaatcccaactctgctatcttcgggggtgccaggcctagagaggaagtcgttcaaaaggagcaagaatga

SEQ ID NO: 151 - DNA, 2388 bp, Homo sapiens
atggccgtgctgctgctgctgctccgtgccctccgccggggtccaggcccgggtcctcggccgctgtggggcccaggcccggcctggagtccagggttccccgccaggcccgggagggggcggccgtacatggccagcaggcctccgggggacctcgccgaggctggaggccgagctctgcagagcttacaattgagactgctaacccctacctttgaagggatcaacggattgttgttgaaacaacatttagttcagaatccagtcagactctggcaacttttaggtggtactttctattttaacacctcaaggttgaagcagaagaataaggagaaggataagtcgaaggggaaggcgcctgaagaggacgaagaggagaggagacgccgtgagcgggacgaccagatgtaccgagagcggctgcgcaccttgctggtcatcgcggttgtcatgagcctcctgaatgctctcagcaccagcggaggcagcatttcctggaacgactttgtccacgagatgctggccaagggcgaggtgcagcgcgtccaggtggtgcctgagagcgacgtggtggaagtctacctgcaccctggagccgtggtgtttgggcggcctcggctagccttgatgtaccgaatgcaggttgcaaatattgacaagtttgaagagaagcttcgagcagctgaagatgagctgaatatcgaggccaaggacaggatcccagtttcctacaagcgaacaggattctttggaaatgccctgtactctgtggggatgacggcagtgggcctggccatcctgtggtatgttttccgtctggccgggatgactggaagggaaggtggattcagtgcttttaatcagcttaaaatggctcgtttcaccattgtggatgggaagatggggaaaggagtcagcttcaaagacgtggcaggaatgcacgaagccaaactggaagtccgcgagtttgtggattatctgaagagcccagaacgcttcctccagcttggcgccaaggtcccaaagggcgcactgctgctcggcccccccggctgtgggaagacgctgctggccaaggcggtggccacggaggctcaggtgcccttcctggcgatggccggcccagagttcgtggaggtcattggaggcctcggcgctgcccgtgtgcggagcctctttaaggaagcccgagcccgggccccctgcatcgtctacatcgatgagatcgacgcggtgggcaagaagcgctccaccaccatgtccggcttctccaacacggaggaggagcagacgctcaaccagcttctggtagaaatggatggaatgggtaccacagaccatgtcatcgtcctggcgtccacgaaccgagctgacattttggacggtgctctgatgaggccaggccgactggaccggcacgtcttcattgatctccccacgctgcaggagaggcgggagatttttgagcagcacctgaagagcctgaagctgacccagtccagcaccttttactcccagcgtctggcagagctgacaccaggattcagtggggctgacatcgccaacatctgcaatgaggctgcgctgcacgcggcgcgggagggacacacttccgtgcacactctcaacttcgagtacgccgtggagcgcgtcctcgcagggactgccaaaaagagcaagatcctgtccaaggaagaacagaaagtggttgcgtttcatgagtcgggccacgccttggtgggctggatgctggagcacacggaggccgtgatgaaggtctccataacccctcggacaaacgccgccctgggctttgctcagatgctccccagagaccagcacctcttcaccaaggagcagctgtttgagcggatgtgcatggccctgggaggacgggcctcggaagcactgtccttcaacgaggtcacttctggggcacaggacgacctgaggaaggtcacccgcatcgcctactccatggtgaagcagtttgggatggcacctggcatcgggcccatctccttccctgaggcgcaggagggcctcatgggcatcgggcggcgccccttcagccaaggcctgcagcagatgatggaccatgaagcaagactgctggtggccaaggcctacagacacaccgagaaggtgctgcaggacaacctggacaagttgcaggcgctggcaaacgcccttctggaaaaggaagtgataaactatgaggacattgaggctctcattggcccgccgccccatgggccgaagaaaatgatcgcaccgcagaggtggatcgacgcccagagggagaaacaggacttgggcgaggaggagaccgaagagacccagcagcctccacttggaggcgaagagccgacttggcccaagtag

SEQ ID NO: 152 - DNA, 1410 bp, Homo sapiens
atgtctgctctgacgcctccgaccgatatgccaacccccaccactgacaagatcacacaggctgccatggagaccatctacctttgcaaattccgagtgtccatggatggagaatggctctgcctgcgagagctggatgacatctcacttacacctgacccagagcctacccatgaagatcctaattatctcatggctaatgaacgcatgaacctcatgaacatggccaagctgagtatcaagggcttgattgaatcagctctgaacctggggaggactcttgactctgactatgcacctctccagcaattctttgtggtgatggagcactgtctgaaacatggcttgaaagctaaaaaaacttttctcggacaaaataaatccttctgggggcctctagaactggtagaaaagcttgttccagaagccgcagagataacagcaagtgttaaagatcttccaggacttaagacaccagtaggtagaggaagagcctggcttcgtttggcattaatgcaaaagaaactttcagaatatatgaaagctttgatcaataagaaagaacttctcagtgaattctacgaacccaatgccctcatgatggaagaagaaggagccataattgctggtctgttggtgggtctgaatgtcattgatgccaatttctgtatgaaaggagaagacttggactctcaggttggagttatagatttttcaatgtatctcaaggacgggaacagcagtaaaggtactgaaggagacggtcagattactgcaattctggaccagaagaactatgtagaagaactgaacagacatttgaatgctactgtaaacaaccttcaggcaaaagtagatgcattagaaaaatccaacactaaactgacagaggagcttgcagttgcaaacaacaggatcattaccttacaagaagaaatggaacgagttaaagaggaaagttcctacatactggaatccaatcggaagggtcccaagcaagacagaactgcagaagggcaagcactaagtgaagcaagaaagcatttaaaagaagagacacaattacgattggatgttgagaaagaactggagatgcagatcagcatgaggcaggagatggaattggctatgaagatgctggagaaggatgtctgtgagaagcaggatgccctggtatctcttcggcagcagctggatgacctcagagctctcaagcatgaacttgcctttaagctgcagagttcagacttaggagtaaaacagaaaagtgaactaaacagtcgcttggaagagaagactaatcagatggctgctaccattaaacaacttgaacaaagtgaaaaggatttggtgaaacaggcaaagaccttaaatagtgcagcaaataaactgatcccaaaacatcattag

SEQ ID NO: 153 - DNA, 483 bp, Homo sapiens
atgacgaacacaaagggaaagaggagaggcacccgatatatgttctctaggccttttagaaaacatggagttgttcctttggccacatatatgcgaatctataagaaaggtgatattgtagacatcaagggaatgggtactgttcaaaaaggaatgccccacaagtgttaccatggcaaaactggaagagtctacaatgttacccagcatgctgttggcattgttgtaaacaaacaagttaagggcaagattcttgccaagagaattaatgtgcgtattgagcacattaagcactctaagagccgagatagcttcctgaaacgtgtgaaggaaaatgatcagaaaaagaaagaagccaaagagaaaggtacctgggttcaactaaagcgccagcctgctccacccagagaagcacactttgtgagaaccaatgggaaggagcctgagctgctggaacctattccctatgaattcatggcataa

SEQ ID NO: 154 - DNA, 3132 bp, Homo sapiens
atgagacggtttaagcggaagcatcttactgccattgactgccagcatttggctcggagtcacttggctgtgacccagcccttcggtcaaagatggacaaacagagatccgaaccatggtctctatcctaaaccgagaacaaaaagagggagtaggggtcagggaagtcaaagatgcatccctgagttcttcctagcaggcaagcagccgtgcaccaatgacatggccaaaagcaattctgttggccaggacagctgtcaggactctgagggtgacatgatctttcctgcagagagcagctgtgcactgcctcaggaaggcagtgcagggccgggctcaccagggtctgccccgccctccaggaagcggtcttggtcctctgaggaagagagtaaccaggctaccgggaccagccggtgggatggagtttctaagaaagctccacggcaccatttgtctgtgccatgcacaaggcctagggaggccaggcaagaagcagaggacagtacgtctcggctctctgcggagtctggtgaaaccgaccaagatgctggggacgtgggtcctgatcccattcctgactcatactatgggcttcttgggaccttgccctgccaggaagcactgagccacatttgcagcctgcctagtgaggtcctgaggcacgtgtttgccttcctcccggtggaagacctctattggaacctgagcttggtgtgccacttgtggagggagatcatcagtgacccgctgttcattccttggaagaagctgtaccatcgatacctgatgaatgaagagcaagctgtcagcaaagtggacggcatcctgtctaactgtggcatagaaaaggagtcagacctgtgtgtgctgaacctcatacgatacacagccaccactaagtgctctccgagtgtggatcccgagagggtgctgtggagtctgagggaccaccccctcctccccgaggctgaggcgtgtgtgcggcaacacctccccgacctctacgctgctgccgggggtgtcaacatctgggccctggtggcggctgtggtgctcctctccagcagtgtgaatgacatccagcgactgctcttctgcctccggagacccagctccacggtgaccatgccagatgtcaccgagaccctgtactgcatagccgtgcttctctacgccatgagggagaaggggattaacatcagcaataggattcactacaacattttctattgcctatatcttcaggagaattcctgcactcaggccacaaaagttaaagaggagccatctgtctggccaggcaagaaaaccatccaacttacacatgaacaacagctgattctgaatcacaagatggaacctctccaggtggtgaaaattatggcctttgccggcactgggaagacctcaacgctggtcaagtatgcagagaagtggtctcagagcaggtttctgtatgtgacattcaacaagagcatcgcaaagcaggccgaacgcgtcttccccagcaacgtcatctgcaaaaccttccactccatggcctacgggcacatagggcggaagtaccagtcaaagaagaagttgaatctcttcaagttaacacccttcatggtcaactccgtccttgctgaagggaagggtggattcataagagccaagcttgtgtgtaagactctagaaaacttctttgcctcggctgacgaagagctgaccattgatcacgtgcctatttggtgtaagaacagccaaggacagagagtcatggttgagcagagtgaaaaactgaatggtgtccttgaagcgagccgcctctgggataacatgcggaagctgggggagtgcacagaagaggcgcaccagatgactcatgacggctacttgaaactctggcagctgagcaagccttcgctggcctcttttgacgccatctttgtggatgaggcccaggactgcacaccagctatcatgaacatagttctgtctcagccatgtgggaaaatctttgtaggggacccgcaccagcagatctataccttccggggtgcggtcaacgccctgttcacagtgccccacacccacgtcttctatctcacgcagagttttcggtttggtgtggaaatagcttatgtgggagctactatcttggatgtttgcaagagagtcaggaaaaagactttggttggaggaaaccatcagagtggcattagaggtgacgcaaaggggcaagtggccttgttgtcccggaccaacgccaacgtgtttgatgaggccgtacgggtgacggaaggggaattcccttcaaggatacatttgattggggggattaaatcatttggattggacagaatcattgatatttggatccttcttcagccagaggaagaacggaggaaacaaaacctcgtcattaaagacaaatttatcagaagatgggtgcacaaagaaggctttagtggcttcaagaggtatgtgaccgctgccgaggacaaggagcttgaagccaagatcgcagttgttgaaaagtataacatcaggattccagagctggtgcaaaggatagaaaaatgccatatagaagatttggactttgcagagtacattctgggcactgtgcacaaagccaaaggcctggagtttgacactgtgcatgttttggatgattttgtgaaagtgccttgtgcccggcataacctgccccagcttccgcacttcagagttgagtcattttctgaggatgaatggaatttactgtatgttgcagtaactcgagccaagaagcgtctcatcatgaccaaatcattggaaaacattttgactttggctggggagtacttcttgcaagcagagctgacaagcaacgtcttaaaaacaggcgtggtgcgctgctgcgtgggacagtgcaacaatgccatccctgttgacaccgtccttaccatgaagaagctgcccatcacctatagcaacaggaaggaaaacaaggggggctacctctgccactcctgtgcggagcagcgcatcgggcccctggcgttcctgacagcctccccggagcaggtgcgcgccatggagcgcactgtggagaacatcgtactgccccggcatgaggccctgctcttcctcgtcttctga

SEQ ID NO: 155 - DNA, 1239 bp, Homo sapiens
atgatcctggcgtcggtgctgaggagcggtcccgggggcgggcttccgctccggcccctcctgggacccgcactcgcgctccgggcccgctcgacgtcggccaccgacacacaccacgtggagatggctcgggagcgctccaagaccgtcacctccttttacaaccagtcggccatcgacgcggcagcggagaagccctcagtccgcctaacgcccaccatgatgctctacgctggccgctctcaggacggcagccaccttctgaaaagtgctcggtacctgcagcaagaacttccagtgaggattgctcaccgcatcaagggcttccgctgccttcctttcatcattggctgcaaccccaccatactgcacgtgcatgagctatatatccgtgccttccagaagctgacagacttccctccgatcaaggaccaggcggacgaggcccagtactgccagctggtgcgacagctgctggatgaccacaaggatgtggtgaccctcttggcagagggcctacgtgagagccggaagcacatagaggatgaaaagctcgtccgctacttcttggacaagacgctgacttcgaggcttggaatccgcatgttggccacgcatcacctggcgctgcatgaggacaagcctgactttgtcggcatcatctgtactcgtctctcaccaaagaagattattgagaagtgggtggactttgccagacgcctgtgtgagcacaagtatggcaatgcgccccgtgtccgcatcaatggccatgtggctgcccggttccccttcatccctatgccactggactacatcctgccggagctgctcaagaatgccatgagagccacaatggagagtcacctagacactccctacaatgtcccagatgtggtcatcaccatcgccaacaatgatgtcgatctgatcatcaggatctcagaccgtggtggaggaatcgctcacaaagatctggaccgggtcatggactaccacttcactactgctgaggccagcacacaggacccccggatcagccccctctttggccatctggacatgcatagtggcgcccagtcaggacccatgcacggctttggcttcgggttgcccacgtcacgggcctacgcggagtacctcggtgggtctctgcagctgcagtccctgcagggcattggcacggacgtctacctgcggctccgccacatcgatggccgggaggaaagcttccggatctga

SEQ ID NO: 156 - DNA, 2850 bp, Homo sapiens
atgtctttggctttcaagatcttctttccacaaaccctccgtgcactcagccgaaaagaactgtgcctattccgaaaacatcactggcgtgatgtaagacaattcagccagtggtcagaaacagatctgcttcatggacatcccctcttcctgagaagaaagcctgttctatcattccagggaagccatctaagatcacgtgccacctaccttgttttcttgccagggttgcatgtgggactctgcagtggcccctgtgagatggctgagcaacggttctgtgtggactatgccaagcgtggcacagctggctgcaaaaaatgcaaggaaaagattgtgaagggcgtatgccgaattggcaaagtggtgcccaatcccttctcagagtctgggggtgatatgaaagagtggtaccacattaaatgcatgtttgagaaactagagcgggcccgggccaccacaaaaaaaatcgaggacctcacagagctggaaggctgggaagagctggaagataatgagaaggaacagataacccagcacattgcagatctgtcttctaaggcagcaggtacaccaaagaagaaagctgttgtccaggctaagttgacaaccactggccaggtgacttctccagtgaaaggcgcctcatttgtcaccagtaccaatccccggaaattttctggcttttcagccaagcccaacaactctggggaagccccctcgagccccacccctaagagaagtctgtcttcaagcaaatgtgaccccaggcataaggactgtctgctacgggagtttcgaaagttatgcgccatggtggccgataatcctagctacaacacgaagacccagatcatccaggacttccttcggaaaggctcagcaggagatggtttccacggtgatgtgtacctaacagtgaagctgctgctgccaggagtcattaagactgtttacaacttgaacgataagcagattgtgaagcttttcagtcgcatttttaactgcaacccagatgatatggcacgggacctagagcagggtgacgtgtcagagacaatcagagtcttctttgagcagagcaagtctttccccccagctgccaagagcctccttaccatccaggaagtggatgagttccttctgcggctgtccaagctcaccaaggaggatgagcagcaacaggccctacaggacattgcctccaggtgtacagccaatgaccttaaatgcatcatcaggttgatcaaacatgatctgaagatgaactcaggtgcaaaacatgtgttagacgcccttgaccccaatgcctatgaagccttcaaagcctcgcgcaacctgcaggatgtggtggagcgggtccttcacaacgcgcaggaggtggagaaggagccgggccagagacgagctctgagcgtccaggcctcgctgatgacacctgtgcagcccatgttggcggaggcctgcaagtccgttgagtatgcaatgaagaaatgtcccaatggcatgttctctgagatcaagtacgatggagagcgagtccaggtgcataagaatggagaccacttcagctacttcagccgcagtctcaagcccgtccttcctcacaaggtggcccactttaaggactacattccccaggcttttcctgggggccacagcatgatcttggattctgaagtgcttctgattgacaacaagacaggcaaaccactgccctttgggactctgggagtacacaagaaagcagccttccaggatgctaatgtctgcctgtttgtttttgattgtatctactttaatgatgtcagcttgatggacagacctctgtgtgagcggcggaagtttcttcatgacaacatggttgaaattccaaaccggatcatgttctcagaaatgaagcgagtcacaaaagctttggacttggctgacatgataacccgggtgatccaggagggattggaggggctggtgctgaaggatgtgaagggtacatatgagcctgggaagcggcactggctgaaagtgaagaaagactatttgaacgagggggccatggccgacacagctgacctggtggtccttggagccttctatgggcaagggagcaaaggcggcatgatgtcaatcttcctcatgggctgctacgaccctggcagccagaagtggtgcacagtcaccaagtgtgcaggaggccatgatgatgccacgcttgcccgcctgcagaatgaactagacatggtgaagatcagcaaggaccccagcaaaatacccagctggttgaaggtcaacaagatctactatcctgacttcatcgtcccagacccaaagaaagctgccgtgtgggagatcacaggggctgaattctccaaatcggaggctcatacagctgacgggatctccatccgattccctcgctgcacccgaatccgagatgataaggactggaaatctgccactaaccttccccaactcaaggaactgtaccagttgtccaaggagaaggcagacttcactgtagtggctggagatgaggggagctccactacagggggtagcagtgaagagaataagggtccctcagggtctgctgtgtcccgcaaggcccccagcaagccctcagccagtaccaagaaagcagaagggaagctgagtaactccaacagcaaagatggcaacatgcagactgcaaagccttccgctatgaaggtgggggagaagctggccacaaagtcttctccagtgaaagtaggggagaagcggaaagctgctgatgagacgctgtgccaaacaaagaggcggccagccagtgagcagagaggaagaactgtgccagcaggcaggagatag

SEQ ID NO: 157 - DNA, 5397 bp, Homo sapiens
atggagctgacctcaagggaaagagggaggggacagcctctgccctgggaacttcgactgggcctactgctaagcgtgctggctgccacactggcacaggcccctgccccggatgtgcctggctgttccaggggaagctgctaccccgccacgggcgacctgctggtgggccgagctgacagactgactgcctcatccacttgtggcctgaatggcccccagccctactgcatcgtcagtcacctgcaggacgaaaagaagtgcttcctttgtgactcccggcgccccttctctgctagagacaacccacacagccatcgcatccagaatgtagtcaccagctttgcaccacagcggcgggcagcctggtggcagtcagagaatggtatccctgcggtcaccatccagctggacctggaggctgagtttcatttcacacacctcattatgaccttcaagacatttcgccctgctgccatgctggtggaacgctcagcagactttggccgcacctggcatgtgtaccgatatttctcctatgactgtggggctgacttcccaggagtcccactagcacccccacggcactgggatgatgtagtctgtgagtcccgctactcagagattgagccatccactgaaggcgaggtcatctatcgtgtgctggaccctgccatccctatcccagacccctacagctcacggattcagaacctgttgaagatcaccaacctacgggtgaacctgactcgtctacacacgttgggagacaacctactcgacccacggagggagatccgagagaagtactactatgccctctatgagctggttgtacgtggcaactgcttctgctacggacacgcctcagagtgtgcacccgccccaggggcaccagcccatgctgagggcatggtgcacggagcttgcatctgcaaacacaacacacgtggcctcaactgcgagcagtgtcaggatttctatcgtgacctgccctggcgtccggctgaggacggccatagtcatgcctgtaggaagtgtgagtgccatgggcacacccacagctgccacttcgacatggccgtatacctggcatctggcaatgtgagtggaggtgtgtgtgatggatgtcagcataacacagctgggcgccactgtgagctctgtcggcccttcttctaccgtgacccaaccaaggacctgcgggatccggctgtgtgccgctcctgtgattgtgaccccatgggttctcaagacggtggtcgctgtgattcccatgatgaccctgcactgggactggtctccggccagtgtcgctgcaaagaacatgtggtgggcactcgctgccagcaatgccgtgatggcttctttgggctcagcatcagtgaccgtctgggctgccggcgatgtcaatgtaatgcacggggcacagtgcctgggagcactccttgtgaccccaacagtggatcctgttactgcaaacgtctagtgactggacgtggatgtgaccgctgcctgcctggccactggggcctgagccacgacctgctcggctgccgcccctgtgactgcgacgtgggtggtgctttggatccccagtgtgatgagggcacaggtcaatgccactgccgccagcacatggttgggcgacgctgtgagcaggtgcaacctggctacttccggcccttcctggaccacctaatttgggaggctgaggacacccgagggcaggtgctcgatgtggtggagcgcctggtgacccccggggaaactccatcctggactggctcaggcttcgtgcggctacaggaaggtcagaccctggagttcctggtggcctctgtgccgaaggctatggactatgacctgctgctgcgcttagagccccaggtccctgagcaatgggcagagttggaactgattgtgcagcgtccagggcctgtgcctgcccacagcctgtgtgggcatttggtgcccaaggatgatcgcatccaagggactctgcaaccacatgccaggtacttgatatttcctaatcctgtctgccttgagcctggtatctcctacaagctgcatctgaagctggtacggacagggggaagtgcccagcctgagactccctactctggacctggcctgctcattgactcgctggtgctgctgccccgtgtcctggtgctagagatgtttagtgggggtgatgctgctgccctggagcgccaggccacctttgaacgctaccaatgccatgaggagggtctggtgcccagcaagacttctccctctgaggcctgcgcacccctcctcatcagcctgtccaccctcatctacaatggtgccctgccatgtcagtgcaaccctcaaggttcactgagttctgagtgcaaccctcatggtggtcagtgcctgtgcaagcctggagtggttgggcgccgctgtgacctctgtgcccctggctactatggctttggccccacaggctgtcaagcctgccagtgcagccacgagggggcactcagcagtctctgtgaaaagaccagtgggcaatgtctctgtcgaactggtgcctttgggcttcgctgtgaccgctgccagcgtggccagtggggattccctagctgccggccatgtgtctgcaatgggcatgcagatgagtgcaacacccacacaggcgcttgcctgggctgccgtgatcacacagggggtgagcactgtgaaaggtgcattgctggtttccacggggacccacggctgccatatgggggccagtgccggccctgtccctgtcctgaaggccctgggagccaacggcactttgctacttcttgccaccaggatgaatattcccagcagattgtgtgccactgccgggcaggctatacggggctgcgatgtgaagcttgtgcccctgggcactttggggacccatcaaggccaggtggccggtgccaactgtgtgagtgcagtgggaacattgacccaatggatcctgatgcctgtgacccccacacggggcaatgcctgcgctgtttacaccacacagagggtccacactgtgcccactgcaagcctggcttccatgggcaggctgcccgacagagctgtcaccgctgcacatgcaacctgctgggcacaaatccgcagcagtgcccatctcctgaccagtgccactgtgatccaagcagtgggcagtgcccatgcctccccaatgtccagggccctagctgtgaccgctgtgcccccaacttctggaacctcaccagtggccatggttgccagccttgtgcctgccacccaagccgggccagaggccccacctgcaacgagttcacagggcagtgccactgccgtgccggctttggagggcggacttgttctgagtgccaagagctccactggggagaccctgggttgcagtgccatgcctgtgattgtgactctcgtggaatagatacacctcagtgtcaccgcttcacaggtcactgcagctgccgcccaggggtgtctggtgtgcgctgtgaccagtgtgcccgtggcttctcaggaatctttcctgcctgccatccctgccatgcatgcttcggggattgggaccgagtggtgcaggacttggcagcccgtacacagcgcctagagcagcgggcgcaggagttgcaacagacgggtgtgctgggtgcctttgagagcagcttctggcacatgcaggagaagctgggcattgtgcagggcatcgtaggtgcccgcaacacctcagccgcctccactgcacagcttgtggaggccacagaggagctgcggcgtgaaattggggaggccactgagcacctgactcagctcgaggcagacctgacagatgtgcaagatgagaacttcaatgccaaccatgcactaagtggtctggagcgagataggcttgcacttaatctcacactgcggcagctcgaccagcatcttgacttgctcaaacattcaaacttcctgggtgcctatgacagcatccggcatgcccatagccagtctgcagaggcagaacgtcgtgccaatacctcagccctggcagtacctagccctgtgagcaactcggcaagtgctcggcatcggacagaggcactgatggatgctcagaaggaggacttcaacagcaaacacatggccaaccagcgggcacttggcaagctctctgcccatacccacaccctgagcctgacagacataaatgagctggtgtgtggggcaccaggggatgcaccctgtgctacaagcccttgtgggggtgccggctgtcgagatgaggatgggcagccgcgctgtgggggcctcagctgcaatggggcagcggctacagcagacctagcactgggccgggcccggcacacacaggcagagctgcagcgggcactggcagaaggtggtagcatcctcagcagagtggctgagactcgtcggcaggcaagcgaggcacagcagcgggcccaggcagccctggacaaggctaatgcttccaggggacaggtggaacaggccaaccaggaacttcaagaacttatccagagtgtgaaggacttcctcaaccaggagggggctgatcctgatagcattgaaatggtggccacacgggtgctagagctctccatcccagcttcagctgagcagatccagcacctggcgggtgcgattgcagagcgagtccggagcctggcagatgtggatgcgatcctggcacgtactgtaggagatgtgcgtcgtgccgagcagctactgcaggatgcacggcgggcaaggagctgggctgaggatgagaaacagaaggcagagacagtacaggcagcactggaggaggcccagcgggcacagggtattgcccagggtgccatccggggggcagtggctgacacacgggacacagagcagaccctgtaccaggtacaggagaggatggcaggtgcagagcgggcactgagctctgcaggtgaaagggctcggcagttggatgctctcctggaggctctgaaattgaaacgggcaggaaatagtctggcagcctctacagcagaagaaacggcaggcagtgcccagggtcgtgcccaggaggctgagcagctgctacgcggtcctctgggtgatcagtaccagacggtgaaggccctagctgagcgcaaggcccaaggtgtgctggctgcacaggcaagggcagaacaactgcgggatgaggctcgggacctgttgcaagccgctcaggacaagctgcagcggctacaggaattggaaggcacctatgaggaaaatgagcgggcactggagagtaaggcagcccagttggacgggttggaggccaggatgcgcagcgtgcttcaagccatcaacttgcaggtgcagatctacaacacctgccagtga

SEQ ID NO: 158 - DNA, 2673 bp, Homo sapiens
atgagcaggtccgcgacgctgctgctgtgcctgctgggctgccacgtctggaaggcggtgaccaagacgctgcgggagcccggcgccggagcccaagaggtgacgttaaaggtgcacatcagcgacgccagcacccaccagcccgtagcagatgcgctcatcgagatcttcaccaaccaggcctccatagcctctggcacctcggggactgatggcgtcgcctttatcaagttccagtataagctgggcagtcagttgattgtcaccgcctcgaagcatgcctacgtgccaaactctgccccatggaagccaatccggttacctgtattttcctctctgagccttggcctgcttccagaacgctctgccactctaatggtatatgaagatgtcgtccaaatagtatcaggattccaaggtgcccggccacagcctcgcgttcatttccagagaagggctctgaggttgcctgagaacaccagctacagtgacctgaccgcgtttctcacggccgccagctccccttcggaggtggacagttttccttatttgcgaggattagacggaaatggaacaggaaacagcaccaggcatgacctgaccccagtcacagccgtcagcgtccacttgctgagcagtaatggaacgccggtgctggtggatggtcccatctatgtcactgtgcccctggccacgcagagcagcctgaggcacaatgcctatgtcgcggcgtggcggtttgaccagaagctgggaacgtggctgaagagcggtctgggtcttgtgcaccaggaaggcagccagctgacgtggacatacattgccccccagttggggtactgggtggccgccatgtcccctcccatcccaggtcccgttgtaacacaggacattaccacgtatcacacggtgtttcttttggccattttaggaggaatggctttcatacttttggttttgctgtgtctccttttatattattgcaggaggaagtgcttgaaacctcgtcagcaccacagaaaactgcagctccctgcaggactggagagttccaaaagagaccagtccacgtccatgtcacacattaacttgctgttttcacgccgagcgtcagaattccctggcccgctgtccgtcaccagccacggccgccccgaggcccccggcacgaaggaactgatgagtggagtccatttggaaatgatgtctccgggcggcgaaggggacctgcacacccccatgctcaagctctcctacagcacctcccaggaatttagctcccgggaggagctcctctcttgcaaggaagaggataaaagccagatctcctttgataacctcactccaagtgggacgctggggaaagactaccataagtcagtggaggtttttcccttaaaggcaagaaaatctatggaaagagaaggctacgagtcctcgggcaatgatgactacaggggtagttacaacaccgtgctctcacagcctttatttgaaaagcaggacagagaaggtccagcctccacgggaagcaaactcaccattcaggaacatctgtaccccgcgccttcatcacctgagaaagaacagctgctggaccgcagacccactgaatgtatgatgtcgcgatcagtagatcacctcgagagacctacgtccttcccacggcccggccagttaatctgctgcagttctgtcgaccaggtcaatgacagcgtttacaggaaagtactgcctgccttggtcatcccggctcattatatgaaactccccggggaccactcctatgtcagccagcccctcgtcgtcccggctgatcagcagcttgagatagaaagactacaggctgagctgtccaatccccatgccgggatcttcccacacccgtcctcacagatccagccccagcccctgtcttcccaggccatctctcagcagcacctgcaggatgcgggcacccgggagtggagccctcagaacgcatccatgtcggagtctctctccatcccagcttccctgaacgacgcggctttggctcagatgaacagtgaggtgcagctcctgactgaaaaggccctgatggagcttgggggtgggaagccgcttccgcacccccgggcgtggttcgtctccttggatggcaggtccaacgctcacgttagacattcatacattgatctccaaagagctggaaggaacggaagtaatgatgccagtttggactctggcgtagatatgaatgaaccaaaatcagcccggaagggaaggggagatgctttgtctctgcagcagaactacccgcccgtccaagagcaccagcagaaagagcctcgagccccagacagcacggcctacacgcagctcgtgtacctggatgacgtggaacagagtggtagcgaatgtgggaccacggtctgtacccccgaggacagtgccctgcgatgcttgttggaggggtcgagtcggagaagtggtggccagctgcccagcctgcaggaggagacgaccagacggactgcggatgccccctcggagccagcagccagcccccaccagagaagatctgcccacgaggaagaggaagacgatgatgatgatgaccaaggagaagacaagaaaagcccctggcagaaacgggaggagaggcccctgatggcgtttaacattaaatga

SEQ ID NO: 159 - DNA, 6678 bp, Homo sapiens
atggcggccctagtgttggaggacgggtcggtcctgcggggccagccctttggggccgccgtgtcgactgccggggaagtggtgtttcaaaccggcatggtcggctaccccgaggccctcactgatccctcctacaaggcacagatcttagtgctcacctatcctctgatcggcaactatggcatccccccagatgaaatggatgagttcggtctctgcaagtggtttgaatcctcgggcatccacgtagcagcactggtagtgggagagtgctgtcctactcccagccactggagtgccacccgcaccctgcatgagtggctgcagcagcatggcatccctggcttgcaaggagtagacactcgggagctgaccaagaagttgcgggaacaggggtctctgctggggaagctggtccagaatggaacagaaccttcatccctgccattcttggaccccaatgcccgccccctggtaccagaggtctccattaagactccacgggtattcaatacagggggtgcccctcggatccttgctttggactgtggcctcaagtataatcagatccgatgcctctgccagcgtggggctgaggtcactgtggtaccctgggaccatgcactagacagccaagagtatgagggtctcttcttaagtaatgggcctggtgaccctgcctcctatcccagtgtcgtatccacactgagccgtgttttatctgagcctaatccccgacctgtctttgggatctgcctgggacaccagctattggccttagccattggggccaagacttacaagatgagatatgggaaccgaggccataaccagccctgcttgttggtgggctctgggcgctgctttctgacatcccagaaccatgggtttgctgtggagacagactcactgccagcagactgggctcctctcttcaccaacgccaatgatggttccaatgaaggcattgtgcacaacagcttgcctttcttcagtgtccagtttcacccagagcaccaagctggcccttcagatatggaactgcttttcgatatctttctggaaactgtgaaagaggccacagctgggaaccctgggggccagacagttagagagcggctgactgagcgcctctgtccccctgggattcccactcccggctctggacttccaccaccacgaaaggttctgatcctgggctcagggggcctctccattggccaagctggagaatttgactactcgggctctcaggcaattaaggccctgaaggaggaaaacatccagacgttgctgatcaaccccaatattgccacagtgcagacctcccaggggctggccgacaaggtctattttcttcccataacacctcattatgtaacccaggtgatacgtaatgaacgccccgatggtgtgttactgacttttgggggccagactgctctgaactgtggtgtggagctgaccaaggccggggtgctggctcggtatggggtccgggtcctgggcacaccagtggagaccattgagctgaccgaggatcgacgggcctttgctgccagaatggcagagatcggagagcatgtggccccgagcgaggcagcaaattctcttgaacaggcccaggcagccgctgaacggctggggtaccctgtgctagtgcgtgcagcctttgccctgggtggcctgggctctggctttgcctctaacagggaggagctctctgctctcgtggccccagcttttgcccataccagccaagtgctagtagacaagtctctgaagggatggaaggagattgagtacgaggtggtgagagacgcctatggcaactgtgtcacggtgtgtaacatggagaacttggacccactgggcatccacactggtgagtccatagtggtggcccctagccagacactgaatgacagggagtatcagctcctgaggcagacagctatcaaggtgacccagcacctgggaattgttggggagtgcaatgtgcagtatgccttgaaccctgagtctgagcagtattacatcattgaagtgaatgccaggctctctcgcagctctgccctggccagtaaggccacaggttatccactggcttatgtggcagccaagctagcattgggcatccctttgcctgagctcaggaactctgtgacagggggtacagcagcctttgaacccagcgtggattattgtgtggtgaagattcctcgatgggaccttagcaagttcctgcgagtcagcacaaagattgggagctgcatgaagagcgttggtgaagtcatgggcattgggcgttcatttgaggaggccttccagaaggccctgcgcatggtggatgagaactgtgtgggctttgatcacacagtgaaaccagtcagcgatatggagttggagactccaacagataagcggatttttgtggtggcagctgctttgtgggctggttattcagtggaccgcctgtatgagctcacacgcatcgaccgctggttcctgcaccgaatgaagcgtatcatcgcacatgcccagctgctagaacaacaccgtggacagcctttgccgccagacctgctgcaacaggccaagtgtcttggcttctcagacaaacagattgcccttgcagttctgagcacagagctggctgttcgcaagctgcgtcaggaactggggatctgtccagcagtgaaacagattgacacagttgcagctgagtggccagcccagacaaattacctatacctaacgtattggggcaccacccatgacctcacctttcgaacacctcatgtcctagtccttggctctggcgtctaccgtattggctctagcgttgaatttgactggtgtgctgtaggctgcatccagcagctccgaaagatgggatataagaccatcatggtgaactataacccagagacagtcagcaccgactatgacatgtgtgatcgactctactttgatgagatctcttttgaggtggtgatggacatctatgagctcgagaaccctgaaggtgtgatcctatccatgggtggacagctgcccaacaacatggccatggcgttgcatcggcagcagtgccgggtgctgggcacctcccctgaagccattgactcggctgagaaccgtttcaagttttcccggctccttgacaccattggtatcagccagcctcagtggagggagctcagtgacctcgagtctgctcgccaattctgccagaccgtggggtacccctgtgtggtgcgcccctcctatgtgctgagcggtgctgctatgaatgtggcctacacggatggagacctggagcgcttcctgagcagcgcagcagccgtctccaaagagcatcccgtggtcatctccaagttcatccaggaggctaaggagattgacgtggatgccgtggcctctgatggtgtggtggcagccatcgccatctctgagcatgtggagaatgcaggtgtgcattcaggtgatgcgacgctggtgacccccccacaagatatcactgccaaaaccctggagcggatcaaagccattgtgcatgctgtgggccaggagctacaggtcacaggacccttcaatctgcagctcattgccaaggatgaccagctgaaagttattgaatgcaacgtacgtgtctctcgctccttccccttcgtttccaagacactgggtgtggacctagtagccttggccacgcgggtcatcatgggggaagaagtggaacctgtggggctaatgactggttctggagtcgtgggagtaaaggtgcctcagttctccttctcccgcttggcgggtgctgacgtggtgttgggtgtggaaatgaccagtactggggaggtggccggctttggggagagccgctgtgaggcatacctcaaggccatgctaagcactggctttaagatccccaagaagaatatcctgctgaccattggcagctataagaacaaaagcgagctgctcccaactgtgcggctactggagagcctgggctacagcctctatgccagtctcggcacagctgacttctacactgagcatggcgtcaaggtaacagctgtggactggcactttgaggaggctgtggatggtgagtgcccaccacagcggagcatcctggagcagctagctgagaaaaactttgagctggtgattaacctgtcaatgcgtggagctgggggccggcgtctctcttcctttgtcaccaagggctaccgcacccgacgcttggccgctgacttctccgtgcccctaatcatcgatatcaagtgcaccaaactctttgtggaggccctaggccagatcgggccagcccctcctttgaaggtgcatgttgactgtatgacctcccaaaagcttgtgcgactgccgggattgattgatgtccatgtgcacctgcgggaaccaggtgggacacataaggaggactttgcttcaggcacagccgctgccctggctgggggtatcaccatggtgtgtgccatgcctaatacccggccccccatcattgacgcccctgctctggccctggcccagaagctggcagaggctggcgcccggtgcgactttgcgctattccttggggcctcgtctgaaaatgcaggaaccttgggcaccgtggccgggtctgcagccgggctgaagctttacctcaatgagaccttctctgagctgcggctggacagcgtggtccagtggatggagcatttcgagacatggccctcccacctccccattgtggctcacgcagagcagcaaaccgtggctgctgtcctcatggtggctcagctcactcagcgctcagtgcacatatgtcacgtggcacggaaggaggagatcctgctaattaaagctgcaaaggcacggggcttgccagtgacctgcgaggtggctccccaccacctgttcctaagccatgatgacctggagcgcctggggcctgggaagggggaggtccggcctgagcttggctcccgccaggatgtggaagccctgtgggagaacatggctgtcatcgactgctttgcctcagaccatgctccccataccttggaggagaagtgtgggtccaggcccccacctgggttcccagggttagagaccatgctgccactactcctgacggctgtaagcgagggccggctcagcctggacgacctgctgcagcgattgcaccacaatcctcggcgcatctttcacctgcccccgcaggaggacacctatgtggaggtggatctggagcatgagtggacaattcccagccacatgcccttctccaaggcccactggacaccttttgaagggcagaaagtgaagggcaccgtccgccgtgtggtcctgcgaggggaggttgcctatatcgatgggcaggttctggtacccccgggctatggacaggatgtacggaagtggccacagggggctgttcctcagctcccaccctcagcccctgccactagtgagatgaccacgacacctgaaagaccccgccgtggcatcccagggcttcctgatggccgcttccatctgccgccccgaatccatcgagcctccgacccaggtttgccagctgaggagccaaaggagaagtcctctcggaaggtagccgagccagagctgatgggaacccctgatggcacctgctaccctccaccaccagtaccgagacaggcatctccccagaacctggggacccctggcttgctgcacccccagacctcacccctgctgcactcattagtgggccaacatatcctgtccgtccagcagttcaccaaggatcagatgtctcacctgttcaatgtggcacacacactgcgtatgatggtgcagaaggagcggagcctcgacatcctgaaggggaaggtcatggcctccatgttctatgaagtgagcacacggaccagcagctcctttgcagcagccatggcccggctgggaggtgctgtgctcagcttctcggaagccacatcgtccgtccagaagggcgaatccctggctgactccgtgcagaccatgagctgctatgccgacgtcgtcgtgctccggcacccccagcctggagcagtggagctggccgccaagcactgccggaggccagtgatcaatgctggggatggggtcggagagcaccccacccaggccctgctggacatcttcaccatccgtgaggagctgggaactgtcaatggcatgacgatcacgatggtgggtgacctgaagcacggacgcacagtacattccctggcctgcctgctcacccagtatcgtgtcagcctgcgctacgtggcacctcccagcctgcgcatgccacccactgtgcgggccttcgtggcctcccgcggcaccaagcaggaggaattcgagagcattgaggaggcgctgcctgacactgatgtgctctacatgactcgaatccagaaggaacgatttggctctacccaggagtacgaagcttgctttggtcagttcatcctcactccccacatcatgacccgggccaagaagaagatggtggtgatgcacccgatgccccgtgtcaacgagataagcgtggaagtggactcggatccccgcgcagcctacttccgccaggctgagaacggcatgtacatccgcatggctctgttagccaccgtgctgggccgtttctag

SEQ ID NO: 160 - DNA, 1359 bp, Homo sapiens
atggaatttcaagcagtagtgatggcagtaggtggaggatctcggatgacagacctaacttccagcattcccaaacctctgcttccagttgggaacaaacctttaatttggtacccattgaacctgcttgagcgtgttggatttgaagaagtcattgtggttacaaccagggatgttcaaaaggctctatgtgcagaattcaagatgaaaatgaagccagatattgtgtgtattcctgatgacgctgacatgggaactgcagattctttgcgctacatatatccaaaacttaagacagatgtgctggtgctgagctgtgatctgataacagacgttgccttacatgaggttgtggacctgtttagagcttatgatgcatcacttgctatgttgatgagaaaaggccaagatagcatagaacctgttcccggtcaaaaggggaaaaaaaaagcagtggagcagcgtgacttcattggagtggacagcacaggaaagaggctgctcttcatggctaatgaagcagacttggatgaagagctggtcattaagggatccatcctacagaagcatcctagaatacgtttccacacgggtcttgtggatgcccacctctactgtttgaaaaaatacatcgtggatttcctaatggaaaatgggtcaataacttctatccggagtgaactgattccatatttagtgagaaaacagttttcctcagcttcctcacaacagggacaagaagaaaaagaggaggatctaaagaaaaaggagctgaagtccttagatatctacagttttataaaagaagccaatacactgaacctggctccctatgatgcctgctggaatgcctgtcgaggagacaggtgggaagacttgtccagatcacaggtgcgctgctatgtccacatcatgaaagaggggctctgctctcgagtgagcacactgggactctacatggaagcaaacagacaggtgcccaaattgctgtctgctctctgtccagaagaaccaccagtccattcgtcagcccagattgtcagcaaacacctggttggagttgacagcctcattgggccagagacacagattggagagaagtcatccattaagcgctcagtcattggctcatcctgtctcataaaagatagagtgactattaccaattgccttctcatgaactcagtcactgtggaggaaggaagcaatatccaaggcagtgtcatctgcaacaatgctgtgatcgagaagggtgcagacatcaaggactgcttgattggaagtggccagaggattgaagccaaagctaaacgagtgaatgaggtgatcgtggggaatgaccagctcatggagatctga

SEQ ID NO: 161 - DNA, 3060 bp, Homo sapiens
atgctttggagggtgcttttgtcaaagaggcctcctttccctcacccagagctggatttccaagaggctcccatacctagctgccctggcagactcccagggaggaaaaacagcgtggccttggcagctgccccgaggaaggagcccacaggtgacagggagaagccattgccattccctgtcctggcccccttcagcaaccctgaacactctgctccagccaaggtggtgagggcagctgttcctaaacagcgcaaaggcagcaaggttggtgactttggagatgcaatcaattggcccacacctggagagatagcccacaagagtgttcagccacagtcccacaagcctcagcctacccgtaaactgccacccaagaaggacatgaaggaacaggagaaaggagaagggagtgatagtaaggagagtccaaaaaccaaatcagatgaatcaggggaggaaaagaatggagatgaggattgccagcgaggcgggcagaagaagaaaggaaacaaacacaagtgggttccattacaaatagacatgaagcctgaagtgcccagagagaaactggcttcacgccccactcgcccaccggagcctagacacatacctgccaatcgcggagagatcaaagggtctgagtctgccacctacgtgcccgtggccccccccaccccagcctggcaaccagagatcaaaccggagcctgcctggcacgaccaggatgagacatcgagtgtgaagagtgatggggctggtggggcgcgggcttccttccgtggccgtggacgggggcgtggtcgcggccggggacgcggccggggtggcactcgaacccattttgactaccagtttggctaccgaaagtttgatggtgtggaggggcctcgtacgcccaagtacatgaacaacatcacctactactttgacaatgtcagcagcaccgagctttacagtgtggatcaggaactgctcaaagactacatcaagcgccagattgaatactacttcagcgtggacaatttagagcgagacttcttcctgcgaaggaaaatggatgctgatggtttcctacccatcacccttattgcttccttccaccgagtgcaggcccttaccactgacatttcactcatctttgcggccctaaaggacagcaaggtggtggagatcgttgatgagaaagttcgtaggagggaggaaccagaaaagtggcctcttcccccaatagtggattattcacagactgatttctcccagcttctcaactgccctgaatttgttccccgtcagcactaccaaaaggagacagagtcggcacctggctctcctcgtgcagtcaccccagtgccaaccaaaacagaggaggtcagcaacctaaagacactacccaagggcctgtctgccagcctgcctgacctggattctgagaactggattgaagtgaagaagaggcctcggccatccccagcacggcccaagaagtcagaggagtccagattttcccacctgacctctctgcctcagcagctgccttcccagcagctgatgtccaaggatcaggatgagcaagaggaactggattttctgtttgacgaggagatggagcagatggatgggcggaagaacaccttcactgcctggtctgatgaggaatctgactatgagattgatgacagggatgtcaacaagatcctcattgtcacccagacaccacattacatgcgccggcacccagggggggaccgcacaggcaaccacacctcgcgtgccaagatgagcgccgaactggccaaggtcattaatgatggcctcttctactatgagcaggacctgtgggctgaaaagtttgaacctgagtattcccagatcaagcaagaagtcgagaacttcaaaaaggtcaatatgatcagccgggagcagtttgacacactgacccctgagccccctgtggatcccaaccaggaagttcctcctgggccacctcggttccagcaagttcctacggatgccctggccaacaagttgtttggtgctcctgagccctccaccatcgcccgctctctaccaaccactgtcccagagtcaccaaactaccgcaacaccaggacccctcgcactccccggacaccacagctcaaagactcaagccagacatcacggttttacccagtggtgaaagaaggacggacactggatgccaagatgcctcgaaaaagaaagacaagacacagttcaaacccacccttggagagccatgtgggctgggtgatggattcccgtgagcacaggccccgtactgcttccatcagctccagcccctcagaagggacgcctacagttggcagctatggctgtacccctcagtcattgcccaagttccagcatccttcccatgaactgctcaaggaaaatggcttcacacaacacgtctaccataagtatcgtaggcgctgccttaatgagcggaaacgcttgggcattggccagtctcaggagatgaacacactcttccgcttctggtccttcttcctccgagatcacttcaacaaaaagatgtatgaggagttcaagcagctggctctggaggacgccaaagaaggctacagatatggtttggagtgcctttttcgatactacagttatggcctggaaaagaagttccggctggacatattcaaggattttcaggaggaaacggtgaaggactatgaagctggccaactgtatgggctggagaagttctgggccttcttgaaatattccaaagccaaaaatttggacattgaccccaaactgcaagaatacctcggcaaattccgacgtcttgaagacttccgagtagatccccccatgggtgaggagggcaaccacaagcgacactcagtggtagcaggaggtggcggcggtgagggcaggaagcggtgcccctcccagtcttccagcaggcctgctgccatgatcagccaaccccctacaccacccaccggccagcctgtccgggaagatgccaaatggacaagccagcactcgaacacacagactttgggaaagtga

SEQ ID NO: 162 - DNA, 5397 bp, Homo sapiens; identical to SEQ ID NO: 157

SEQ ID NO: 163 - DNA, 1995 bp, Homo sapiens
atggagaccccgtcccagcggcgcgccacccgcagcggggcgcaggccagctccactccgctgtcgcccacccgcatcacccggctgcaggagaaggaggacctgcaggagctcaatgatcgcttggcggtctacatcgaccgtgtgcgctcgctggaaacggagaacgcagggctgcgccttcgcatcaccgagtctgaagaggtggtcagccgcgaggtgtccggcatcaaggccgcctacgaggccgagctcggggatgcccgcaagacccttgactcagtagccaaggagcgcgcccgcctgcagctggagctgagcaaagtgcgtgaggagtttaaggagctgaaagcgcgcaataccaagaaggagggtgacctgatagctgctcaggctcggctgaaggacctggaggctctgctgaactccaaggaggccgcactgagcactgctctcagtgagaagcgcacgctggagggcgagctgcatgatctgcggggccaggtggccaagcttgaggcagccctaggtgaggccaagaagcaacttcaggatgagatgctgcggcgggtggatgctgagaacaggctgcagaccatgaaggaggaactggacttccagaagaacatctacagtgaggagctgcgtgagaccaagcgccgtcatgagacccgactggtggagattgacaatgggaagcagcgtgagtttgagagccggctggcggatgcgctgcaggaactgcgggcccagcatgaggaccaggtggagcagtataagaaggagctggagaagacttattctgccaagctggacaatgccaggcagtctgctgagaggaacagcaacctggtgggggctgcccacgaggagctgcagcagtcgcgcatccgcatcgacagcctctctgcccagctcagccagctccagaagcagctggcagccaaggaggcgaagcttcgagacctggaggactcactggcccgtgagcgggacaccagccggcggctgctggcggaaaaggagcgggagatggccgagatgcgggcaaggatgcagcagcagctggacgagtaccaggagcttctggacatcaagctggccctggacatggagatccacgcctaccgcaagctcttggagggcgaggaggagaggctacgcctgtcccccagccctacctcgcagcgcagccgtggccgtgcttcctctcactcatcccagacacagggtgggggcagcgtcaccaaaaagcgcaaactggagtccactgagagccgcagcagcttctcacagcacgcacgcactagcgggcgcgtggccgtggaggaggtggatgaggagggcaagtttgtccggctgcgcaacaagtccaatgaggaccagtccatgggcaattggcagatcaagcgccagaatggagatgatcccttgctgacttaccggttcccaccaaagttcaccctgaaggctgggcaggtggtgacgatctgggctgcaggagctggggccacccacagcccccctaccgacctggtgtggaaggcacagaacacctggggctgcgggaacagcctgcgtacggctctcatcaactccactggggaagaagtggccatgcgcaagctggtgcgctcagtgactgtggttgaggacgacgaggatgaggatggagatgacctgctccatcaccaccacggctcccactgcagcagctcgggggaccccgctgagtacaacctgcgctcgcgcaccgtgctgtgcgggacctgcgggcagcctgccgacaaggcatctgccagcggctcaggagcccaggtgggcggacccatctcctctggctcttctgcctccagtgtcacggtcactcgcagctaccgcagtgtggggggcagtgggggtggcagcttcggggacaatctggtcacccgctcctacctcctgggcaactccagcccccgaacccagagcccccagaactgcagcatcatgtaa

SEQ ID NO: 164 - DNA, 3207 bp, Homo sapiens
atgaacagcatcaagaacgtgccggcgcgggtgctgagccgcaggccgggccacagcctggaggccgagcgcgagcagttcgacaagacccaggccatcagcatcagcaaagccatcaacacccaggaggcccccgtgaaggagaagcacgcccggcgcatcattctgggcacacaccacgagaagggggctttcaccttctggtcctatgccattgggctgccgctgcccagcagctccattctcagctggaagttctgccacgtcctccacaaggtccttcgagacgggcaccccaatgtgctgcatgactgccagcggtaccgcagcaacatccgggagattggagacctgtggggacatttgcatgaccgctacggacagctggtgaatgtctacaccaagctgctgctgaccaagatctccttccacctcaagcatccccagtttcccgcgggcctggaggtgacagatgaggtactggagaaggcagctgggaccgatgtcaacaacatcttccagctcactgtggagatgtttgattacatggattgtgagctgaagctttctgaatcagttttccgacagctcaacacggccatcgccgtatcccagatgtcctcaggccagtgccgcctggcccccctcatccaggtcatccaggactgcagccacctctaccactacacggtcaagctcctgttcaagctacactcttgtctccctgcggacaccctgcaaggccacagggaccggttccacgagcagtttcacagcctcaggaacttcttccgcagagcctccgacatgctgtacttcaagcggctcatccagatcccccggctgcccgagggaccccctaacttcctgcgggcctcagccctggctgagcacatcaagccggtggtggtgatccccgaggaggccccggaagatgaggagccggagaatctcattgagatcagcacagggccccccgcgggggagccagtggtggtggctgacctcttcgatcagacgtttggaccccccaatgggtctgtgaaggacgacagggacctccagattgagagcttgaagagagaggtggaaatgctccgctctgaactggagaagatcaagctggaggcccagcggtacatcgcgcagctgaagagccaggtgaatgcactggagggtgagctggaggagcagcggaagcagaagcagaaggccctggtggataatgagcagctccgccacgagctggcccagctgagggctgcccagctggagggcgagcggagccagggcctgcgtgaggaggctgagaggaaggccagtgccacggaggcgcgctacaacaagctgaaggaaaagcacagtgagctcgtccatgtgcacgcggagctgctcagaaagaacgcggacacagccaagcagctgacggtgacgcagcaaagccaggaggaggtggcgcgggtgaaggagcagctggccttccaggtggagcaggtgaagcgggagtcggagttgaagctagaggagaagagcgaccagctggagaagctcaagagggagctggaggccaaggccggagagctggcccgcgcgcaggaggccctgagccacacagagcagagcaagtcggagctgagctcacggctggacacgctgagtgcggagaaggatgctctgagtggagctgtgcggcagcgggaggcagacctgctggcggcgcagagcctggtgcgcgagacagaggcggcgctgagccgggagcagcagcgcagctcccaggagcagggcgagttgcagggccggctggcagagagggagtctcaggagcaggggctgcggcagaggctgctggacgagcagttcgcagtgttgcggggcgctgctgccgaggccgcgggcatcctgcaggatgccgtgagcaagctggacgaccccctgcacctgcgctgtaccagctccccagactacctggtgagcagggcccaggaggccttggatgccgtgagcaccctggaggagggccacgcccagtacctgacctccttggcagacgcctccgccctggtggcagctctgacccgcttctcccacctggctgcggataccatcatcaatggcggtgccacctcgcacctggctcccaccgaccctgccgaccgcctcatagacacctgcagggagtgcggggcccgggctctggagctcatggggcagctgcaggaccagcaggctctgcggcacatgcaggccagcctggtgcggacacccctgcagggcatccttcagctgggccaggaactgaaacccaagagcctagatgtgcggcaggaggagctgggggccgtggtcgacaaggagatggcggccacatccgcagccattgaagatgctgtgcggaggattgaggacatgatgaaccaggcacgccacgccagctcgggggtgaagctggaggtgaacgagaggatcctcaactcctgcacagacctgatgaaggctatccggctcctggtgacgacatccactagcctgcagaaggagatcgtggagagcggcaggggggcagccacgcagcaggaattttacgccaagaactcgcgctggaccgaaggcctcatctcggcctccaaggctgtgggctggggagccacacagctggtggaggcagctgacaaggtggtgcttcacacgggcaagtatgaggagctcatcgtctgctcccacgagatcgcagccagcacggcccagctggtggcggcctccaaggtgaaggccaacaagcacagcccccacctgagccgcctgcaggaatgttctcgcacagtcaatgagagggctgccaatgtggtggcctccaccaagtcaggccaggagcagattgaggacagagacaccatggatttctccggcctgtccctcatcaagctgaagaagcaggagatggagacgcaggtgcgtgtcctggagctggagaagacgctggaggctgaacgcatgcggctgggggagttgcggaagcaacactacgtgctggctggggcatcaggcagccctggagaggaggtggccatccggcccagcactgccccccgaagtgtaaccaccaagaaaccacccctggcccagaagcccagcgtggcccccagacaggaccaccagcttgacaaaaaggatggcatctacccagctcaactcgtgaactactag

SEQ ID NO: 165 - DNA, 3158 bp, Homo sapiens
accaatgagcggcgccgtgggcgggccgcgggcgcgcatgctctgggcccgcagttgaagtggcgagagcgctcagatacgcgacgcgtagcaggcggggaccgaacgggtgcctcagtgtccttcccctcccctcgcctggcctcgccgtcctctccccgcagccggaccggaactatgtgatcccggaagttccggggcctttgctgtgtgggataaacagtaatggcggaggctgcaactcccggaacaacagccacaacatcaggagcaggagcggcagcggcgacggcggcagcagcctcccccaccccgatccccacagtcaccgccccgtccctgggggcgggcggagggggcggcggcagcgacggcagcggcggcggctggactaaacaggtcacctgcaggtattttatgcatggggtttgtaaggaaggagacaactgtcgctactcgcatgacctctctgacagtccgtatagtgtagtgtgcaagtattttcagcgagggtactgtatttatggagaccgctgcagatatgaacatagcaaaccattgaaacaggaagaagcaactgctacagagctaactacaaagtcatcccttgctgcttcctcaagtctctcatcgatagttggaccacttgttgaaatgaatacaggcgaagctgagtcaagaaattcaaactttgcaactgtaggagcaggttcagaggactgggtgaatgctattgagtttgttcctgggcaaccctactgtggccgtactgcgccttcctgcactgaagcacccctgcagggctcagtgaccaaggaagaatcagagaaagagcaaaccgccgtggagacaaagaagcagctgtgcccctatgctgcagtgggagagtgccgatacggggagaactgtgtgtatctccacggagattcttgtgacatgtgtgggctgcaggtcctgcatccaatggatgctgcccagagatcgcagcatatcaaatcgtgcattgaggcccatgagaaggacatggagctctcatttgccgtgcagcgcagcaaggacatggtgtgtgggatctgcatggaggtggtctatgagaaagccaaccccagtgagcgccgcttcgggatcctctccaactgcaaccacacctactgtctcaagtgcattcgcaagtggaggagtgctaagcaatttgagagcaagatcataaagtcctgcccagaatgccggatcacatctaactttgtcattccaagtgagtactgggtggaggagaaagaagagaagcagaaactcattctgaaatacaaggaggcaatgagcaacaaggcgtgcaggtattttgatgaaggacgtgggagctgcccatttggagggaactgtttttacaagcatgcgtaccctgatggccgtagagaggagccacagagacagaaagtgggaacatcaagcagataccgggcccaacgaaggaaccacttctgggaactcattgaggaaagagagaacagcaacccctttgacaacgatgaagaagaggttgtcacctttgagctgggcgagatgttgcttatgcttttggctgcaggtggggacgacgaactaacagactctgaagatgagtgggacttgtttcatgatgagctggaagatttttatgacttggatctatagcaaccttgcgtggcgtgtgaactggtctgctgacctcagacagcagctgtcccctgtggtggtgtggcagtgcctgtgttctctcctaggcaggcctctcaactccaggtgctgtcctaagaatttttacccagggcctgtcttctcaacccctcacctttccctgaggagtgtgttgttttccctgttgaaaaaagttacaaaaataaatcttaaagttagttttttgtaacacgaatttaactgtcagacagttagtgtaggtgtgttgcgtcatctgttttcaaccagattgcatttatggacttttcacacactcattttgaggaccccaggttcaaaagtaaaagcagtggccctgctttggggtccaagaataggagtgatgggtgaagggacctaagctggccaatagccctctgccccagacatgggatgtggatccttgaggtttctggtgaaatctgcacatctgtgtttttatatctgttccctaccctgtaatccctaccacgtgcacttgttctgtggttttggtctcttgtttaattgcacacaagtaatactactgggtaaccagaatcaggtgtgaatgtgttgagattttttactgttttgcatgataggaaaattgagaaagaatacgtataaaagatagagaggcataacatcaatgcagagttggaagttggctcccaagggctgacatggtgtgagtgtgtgggtgtgtgataagcttctcatccctgcatagatgcagtattcttagccttagtagaaaaacctggtttagtggtttaagccttgtgtggcagatagatcttaaagggcaaagcagtatattggtagttgtcaatatagcagtgctagctctgtctatataaatagagaaatggggttagccatagaggttaaaactacctggttatcccatataataacacaaactgggtcttggatacacagttgtatttaatgttttacgatctagcctttccagtacaggcactttctgagaaacctttgtcctcacttgaggcattttgttgtcgggtttttgtgtttgtttttgtgggtatttgcctcattccacccctgagctttcaggtagacagacgtgattcaaaactctgttctaaggtgtttattgtagtggagtaatgggtttgcagtgataagtcatacttttccaccgaaagggagggcttgggaatccctgagattagctaaagttaagttgttggaagaattccttgattggaaattgtacctttgtgttttgttgctctgtttcctgaaaataactcggggatgctcctggtttgtccatctactgctttgattccttggatcccacccattctttcactttaagaaaaaacaaataattgttgcagaggtctctgtattttgcagctgcccttttgtaagaagcacttttcccaaataaaacaattaaaaaaaaagttggctgttcaaaaaaa

SEQ ID NO: 166 - DNA, 4668 bp, Homo sapiens
atgtcagagcagacgccggccgaggccggtgctgcgggggcccgggaggacgcctgtcgggattatcagtcatcgctcgaagacctgaccttcaatagcaagccgcacatcaatatgctgaccattctagccgaggagaacctgcccttcgccaaggagatcgtctctctcatcgaggcccaaaccgccaaggctccttcctcagagaagcttcctgttatgtaccttatggattctattgtgaaaaacgttggaagagagtatctcactgcctttactaaaaatctagttgcaacatttatttgtgtgtttgaaaaggtggatgaaaatactaggaaaagtttatttaagttacgttctacatgggatgaaatattccctttgaagaaactttatgccctggatgtcagagtcaattcattagatcctgcttggcctattaaacctctaccccccaatgtgaatacgtctagcatccatgtgaatcctaaatttttaaataaatcgcccgaggagccttcaacacctggtacagtggtcagttcccctagcatctccactcctccaattgttcctgatatacaaaagaatcttacacaagaacaactaataaggcagcagttactggcaaagcaaaaacagttgttagaacttcagcagaaaaagctggagcttgagctagagcaagctaaggcacagttggcagtttctcttagtgttcagcaggaaacatccaatttaggtcctggatctgcaccatccaaattacatgtttcacagattccccctatggcagttaaagctcctcatcaggttcctgtgcaatctgagaaaagccgtccaggaccatccttacaaattcaggatttaaaaggaactaaccgggatcctcgtctgaacaggataagccaacattctcatggaaaagatcagagtcacaggaaagaatttctaatgaacacattaaaccagtctgatactaagacaagtaaaactataccctctgaaaaactaaattcatccaagcaagaaaaaagtaaatcaggtgaaaaaataaccaagaaagaacttgaccaattagattctaaatcgaaatcgaaatcgaaatcaccctcacctttgaaaaacaaattatctcacacaaaagacttgaaaaatcaagaatcggaaagtatgaggttgtctgatatgaacaagagagatccaagattaaaaaaacatcttcaggataagaccgatggcaaagatgatgatgtgaaagagaagagaaaaactgcagaaaaaaaggataaagatgagcacatgaagtcatccgaacacagactggctggaagtagaaataaaatcataaatggcattgtacaaaaacaggatacaataacagaagagtcagaaaaacaggggacaaaaccagggagatcgagtactagaaagcgatcaagatctcgatcacccaagtctaggtcaccaattatacattccccaaagagaagagataggcggtcacccaaacgaaggcaaagaagtatgtctccaacatcgacacctaaagctggaaagattcgccaatctggagctaagcagtcacatatggaagagtttacaccaccttctagggaagacagaaatgctaagagaagtactaaacaggatattcgggatccaaggcgaatgaaaaagactgaagaggagcgaccacaagaaactacaaatcagcattctacaaagtcaggcactgaaccaaaggagaatgtagaaaactggcaaagttccaagtctgccaaaagatggaaatctggttgggaagaaaataaaagcttacaacaggttgatgaacatagtaaacctcctcatctgaggcatagggagagctggtcaagcactaaaggaattttatcacctcgagccccaaagcagcaacagcatcgattaagtgtagatgccaatcttcagattcctaaagagttaactcttgcaagcaaaagagaattacttcaaaagacgagtgaacgtttagcatctggtgaaattacacaggatgacttccttgttgttgtgcatcaaattcgacagctatttcagtatcaagaaggtgtgcgagaagagcagagatctccattcaatgatcgttttccacttaagcgacctcgatatgaagattcagataaaccatttgtagatagtccagcatcaagattcgccggcctggatacaaatcagcgacttacagctttagctgaagacagaccgttatttgatggacctagtaggccatcagtagcaagagatggcccaacgaagatgatttttgaaggacccaataaattaagccctcgaattgatggacctcccacaccagcttctcttcggtttgatgggtcaccaggacaaatggggggaggaggccctttgagatttgaggggccacaaggtcagctaggaggtgggtgtcctttgagatttgaaggtcctccaggaccagtggggacacctctgcggtttgagggcccaattggtcaagcaggaggaggtggttttcggtttgaaggttcccctggtctgaggtttgagggatctccaggtggtttgagatttgagggaccaggaggccagcctgtgggtggtctgaggtttgagggacatcgtggtcaacctgtgggtggtctaaggtttgagggacctcatggtcagcctgtgggtggacttagatttgataatccccgaggtcagcctgtaggtggacttagatttgaggggggtcatggtccatcaggggctgcgattaggtttgatggacctcatggtcagccaggaggtggaatcagatttgagggccctttgctacagcaaggggttggaatgaggtttgagggcccccatggtcagtcagtagctggtctgagatttgagggacaacataatcaacttggtgggaaccttaggtttgagggtccacatggtcagccaggggttggtatcaggtttgaaggccctttagtccaacaaggaggtggaatgaggtttgagggtccttctgtaccaggaggtggcctgagaattgaagggcctctgggtcaaggtggtccaagatttgaaggttgtcatgctttaaggtttgatgggcagccaggtcagccgtcactcttgccaagatttgatggattacatggtcagccaggtcctagatttgaaaggactcctggtcagccaggccctcagaggtttgatggaccacctggacagcaggttcaacccagatttgacggtgtacctcaaagatttgatggtccacaacatcagcaagcatcaaggtttgatattcctcttggtcttcaaggcacaagatttgacaatcatccttcacaaaggcttgaatcagtatctttcaatcagactggtccatataatgatccacctggcaatgcttttaatgccccatcccaaggactacagttccaaagacatgaacaaatatttgattcacctcaaggaccaaattttaatggaccacatggccctggaaaccagagtttctctaatccacttaacagagcttctggacactattttgatgaaaaaaatcttcagagttctcaatttggaaactttggcaatatacctgctccaatgacagtaggaaatattcaggcatctcaacaggttctgagtggtgttgctcagccagtagcttttggtcaaggacaacagtttttaccagttcatccacaaaatcctggatttgttcagaatccttcaggagccctccctaaggcatatcctgataatcatctcagtcaggtggatgtaaatgaattgttttcaaaattgctaaaaacaggaattctcaaattgtcccaaactgattcagctacaacacaagtaagtgaagtaactgctcagcctccccctgaagaggaggaagatcaaaatgaagatcaagatgttccagatcttactaattttacagttgaagaattgaaacaacgttatgacagtgttataaatcgactgtacactggtattcagtgttactcttgtggaatgaggtttacaacatcacagacagatgtttatgcagatcatttggactggcattatcggcaaaatagaactgaaaaggatgttagccgaaaagtcactcatagacgttggtactacagtttaacagactggatagaatttgaggagatagctgatctggaagaacgggcaaagagccagttttttgaaaaggtgcatgaagaagttgtgctcaaaactcaagaggctgctaaagaaaaagagttccaaagtgtacctgctggaccagctggagcagttgagagttgtgaaatctgtcaagaacaatttgaacaatactgggatgaagaagaggaggaatggcatttgaaaaatgctattagagtagatggaaagatttatcatccatcatgttatgaagattatcaaaatacatcttcatttgattgtacaccatctcccagcaagacaccagttgaaaaccccttgaatattatgttgaacattgtcaaaaacgaattgcaggaaccctgtgacagtcccaaagttaaggaagaacgaattgatacaccaccagcttgtacagaggaaagcatagcaacaccctctgaaattaaaacagaaaatgacacagtcgagtcagtttaa

SEQ ID NO: 167 - DNA, 2577 bp, Homo sapiens
atgtcggtggtggggttggacgtgggctcgcagagctgctacatcgcggtagcccgggccgggggcatcgagaccatcgccaatgagttcagcgaccggtgcaccccgtcagtcatatcatttggatcaaaaaatagaacaatcggagttgcagccaaaaatcagcaaatcactcatgcaaacaatacggtgtctaacttcaaaagatttcatggccgagcattcaatgaccccttcattcaaaaggagaaggaaaacttgagttacgatttggttccattgaaaaatggtggagttggaataaaggtaatgtacatgggtgaagaacatctatttagtgtggagcagataacagccatgttgttgactaagctgaaggaaactgctgaaaacagcctcaagaaaccagtaacagattgtgttatttcagtcccctccttctttacagatgctgagaggcgatctgtgttagatgctgcacagattgttggcctaaactgtttaagacttatgaatgacatgacagctgttgctttgaattacggaatttataagcaggatctcccaagcctggatgagaaacctcggatagtggtttttgttgatatgggacattcagcttttcaagtgtctgcttgtgcttttaacaagggaaaattgaaggtactgggaacagcttttgatcctttcttaggaggaaaaaacttcgatgaaaagttagtggaacatttttgtgcagaatttaaaactaagtacaagttggatgcaaaatccaaaatacgagcactcctacgtctgtatcaggaatgtgaaaaactgaaaaagctaatgagctctaacagcacagaccttccactgaatatcgaatgctttatgaatgataaagatgtttccggaaagatgaacaggtcacaatttgaagaactctgtgctgaacttctgcaaaagatagaagtacccctttattcactgttggaacaaactcatctcaaagtagaagatgtgagtgcagttgagattgttggaggcgctacacgaattccagctgtgaaggaaagaattgccaaattctttggaaaagatattagcacaacactcaatgcagatgaagcagtagccagaggatgtgcattacagtgtgcaatactttccccggcatttaaagttagagaattttccgtcacagatgcagttccttttccaatatctctgatctggaaccatgattcagaagatactgaaggtgttcatgaagtctttagtcgaaaccatgctgctcctttctccaaagttctcacctttctgagaagggggccttttgagctagaagctttctattctgatccccaaggagttccatatccagaagcaaaaataggccgctttgtagttcagaatgtttctgcacagaaagatggagaaaaatctagagtaaaagtcaaagtgcgagtcaacacccatggcattttcaccatctctacggcatctatggtggagaaagtcccaactgaggagaatgaaatgtcttctgaagctgacatggagtgtctgaatcagagaccaccagaaaacccagacactgataaaaatgtccagcaagacaacagtgaagctggaacacagccccaggtacaaactgatgctcaacaaacctcacagtctcccccttcacctgaacttacctcagaagaaaacaaaatcccagatgctgacaaagcaaatgaaaaaaaagttgaccagcctccagaagctaaaaagcccaaaataaaggtggtgaatgttgagctgcctattgaagccaacttggtctggcagttagggaaagaccttcttaacatgtatattgagacagagggtaagatgataatgcaagataaattggaaaaagaaaggaatgatgctaaaaatgcagttgaggaatatgtgtatgagttcagagacaagctgtgtggaccatatgaaaaatttatatgtgagcaggatcatcaaaattttttgagactcctcacagaaactgaagactggctgtatgaagaaggagaggaccaagctaaacaagcatatgttgacaagttggaagaattaatgaaaattggcactccagttaaagttcggtttcaggaagctgaagaacggccaaaaatgtttgaagaactaggacagaggctgcagcattatgccaagatagcagctgacttcagaaataaggatgagaaatacaaccatattgatgagtctgaaatgaaaaaagtggagaagtctgttaatgaagtgatggaatggatgaataatgtcatgaatgctcaggctaaaaagagtcttgatcaggatccagttgtacgtgctcaggaaattaaaacaaaaatcaaggaattgaacaacacatgtgaacccgttgtaacacaaccgaaaccaaaaattgaatcacccaaactggaaagaactccaaatggcccaaatattgataaaaaggaagaagatttagaagacaaaaacaattttggtgctgaacctccacatcagaatggtgaatgttaccctaatgagaaaaattctgttaatatggacttggactag

SEQ ID NO: 168 - DNA, 681 bp, Homo sapiens
atggaggggtgtgtgtctaacctaatggtctgcaacctggcctacagcgggaagctggaagagttgaaggagagtattctggccgataaatccctggctactagaactgaccaggacagcagaactgcattgcactgggcatgctcagctggacatacagaaattgttgaatttttgttgcaacttggagtgccagtgaatgataaagacgatgcaggttggtctcctcttcatattgcggcttctgctggccgggatgagattgtaaaagcccttctgggaaaaggtgctcaagtgaatgctgtcaatcaaaatggctgtactcccttacattatgcagcttcgaaaaacaggcatgagatcgctgtcatgttactggaaggcggggctaatccagatgctaaggaccattatgaggctacagcaatgcaccgggcagcagccaagggtaacttgaagatgattcatatccttctgtactacaaagcatccacaaacatccaagacactgagggtaacactcctctacacttagcctgtgatgaggagagagtggaagaagcaaaactgctggtgtcccaaggagcaagtatttacattgagaataaagaagaaaagacacccctgcaagtggccaaaggtggcctgggtttaatactcaagagaatggtggaaggttaa

SEQ ID NO: 169 - DNA, 3750 bp, Homo sapiens
atggtggaggcggcgccccccgggcccgggccgctgcggaggacctttctagtgcccgagatcaagtcgctggaccagtacgatttctcgcgggccaaggcggcggccagcctggcgtgggtgctgcgggccgcgttcgggggcgcagagcacgtgcccccggagctgtgggagcccttctataccgaccagtacgcgcaggagcatgtgaagcccccggtgacacggctgctgctctcagccgagctctactgcagagcctggcgccaggcactgccacagcttgaaacaccccccaacccctctgcactgctggccctgctggcgcggaggggcacagtgcctgctttgcccgagcgcccggtgcgcgaggccgacctgaggcaccagcccattctcatgggagcccacctagctgtcattgatgccctcatggctgcctttgccttcgagtggacaaagaccctgccaggtcccttggccctgaccagcttggagcacaagctgcttttctgggtggacacgaccgtccggcggctgcaggagaagaccgagcaggaagcggcccagcgagcctctccagcagcccctgcagacggggcggccccggcgcagccctcgatccgataccgcaaggaccgtgtggtggcgcgacgtgccccctgcttcccgacggtgaccagcctccaggacctggccagtggggccgcgctggccgccaccatccactgctattgtccccagctgcttcgacttgaggaggtgtgcttgaaggaccccatgtctgtggcggacagcctgtacaacctccagctcgtgcaggatttctgtgcctctcgccttcctcgtggctgccccctgtcccttgaggacttgctgtacgtcccaccgccactcaaggtcaacttggtggtgatgctggccgagttgttcatgtgttttgaggtgctcaagcccgactttgtgcaagtgaaggacttgcccgatggtcacgctgcctccccccggggcactgaggcctccccacctcagaacaacagcggcagtagttctcctgtcttcaccttccgccacccgcttctgtcatctggtggcccccagtccccactccgaggatccacaggctccctgaagtcttccccgtccatgtcccatatggaggccctgggcaaggcctggaaccggcagctcagccgtcccctctcccaggctgtgtcattcagcaccccctttggcctggacagcgacgtggatgtcgtcatgggagaccctgtgctcctccgctctgtgagctcggacagcctgggccccccgcgtcccgcgccggccaggacccccacccagccacccccggagcctggtgacctgcccaccatcgaggaagctctgcagatcatccacagtgccgagccccggctcctcccagatggggcggccgacggcagcttctacctccactcccctgaggggccctccaagccatccctggcctccccctacctgcccgaggggacctccaaaccactgtccgacaggcccaccaaagcaccagtgtacatgccacaccccgagaccccctcgaaaccatctccctgtctggtgggggaggcatcgaaaccgccagccccatccgaggggtccccgaaggcggtggcttcgtccccagcagccaccaactccgaggtgaaaatgaccagctttgcagaacgcaagaaacagctggtgaaggcagaggctgaggccggagcggggtcccccacgtccactccggccccgccggaggccctgagctcggagatgagtgagctcagcgcccggctggaggagaaacgcagagccatcgaggctcagaagcgacggattgaggccatattcgccaagcaccgccagcggctgggcaaaagcgccttcctgcaggtgcagccgcgggaagcctctggggaggcggaagcagaggcggaggaggccgattccggtccagtccctggtggggagcggcccgcaggcgagggccagggtgagccaacctcacggcccaaggcagtgaccttctcgccagacctgggcccggtgccccacgaggggctgggggaatacaatcgagcggtcagcaagctgagtgccgccttgagctcgctgcagcgggacatgcagaggctcacggaccagcagcagcggctcctggccccgcccgaggcccccggatccgccccaccacctgctgcgtgggtcatccctggccccacgacggggcccaaagctgcatcccccagccccgcccggcgagtcccggccacccggcgcagccctgggcccgggcccagccagtcaccccgcagcccgaaacacacgcggccagcggagctgcggctggcacccttgaccagggtgcttacgccaccccacgacgtagacagcctcccccacctgcgcaagttctcgccgagccaggtgcccgtgcagacgcgctcttccatcctcctggcggaggagacgccccccgaggagccagccgcccggccgggcctcatcgagatcccgctgggcagcctggcagatcccgccgccgaggacgagggagacgggagccccgctggtgctgaggattccttggaggaggaggcgtcttcggagggggagccccgggtggggctggggttcttctacaaggatgaagacaagcctgaggacgagatggcccaaaagcgggccagcctgctggagcggcagcagcggcgagcagaggaggcgcggcggcgcaagcagtggcaggaggtggagaaggaacagcggagggaggaggccgcgaggctggcccaagaggaggccccgggcccagccccgcttgtgtccgcagtcccgatggcgactccagcccctgctgcccgggctccagccgaggaggaggtgggcccccggaagggggacttcacgcggcaggagtacgagcgccgggcccagctgaagctgatggacgacctcgataaggtgctgcggccccgggctgcggggtccgggggtccaggtcggggcgggcggagggccacccggcctcgctcgggttgctgtgacgactcagccctggcacgaagcccagcccgcggcctgctgggctctcggctgagcaaaatctattcccagtccaccctgtcactgtccactgtggccaacgaggcccacaataacctcggggtgaagaggcccacgtctcgggctccctccccgtcaggtctcatgtccccaagccgcctgcctggaagccgcgaacgggactgggaaaatggcagcaatgcctcctccccagcgtcagtgcccgagtacacaggtccacggctgtacaaagaacccagcgccaagtccaacaagttcatcatccacaatgccctatcacactgctgcctggcgggcaaggtgaacgaaccgcagaagaatcgcattctggaggaaattgagaaaagcaaggccaaccacttcctgatcctctttcgcgactcgagctgccagttccgggcgctctacacgctgtcgggggagacagaggagctgtcgcggctggcagggtatgggccccggaccgtcacgcccgccatggtggaaggcatctacaagtacaactcggaccgcaagcgcttcacccagatccccgccaagaccatgtccatgagcgtcgatgccttcaccatccagggacacctctggcagggcaagaaacccaccactcccaagaagggcggcggcacccccaaatag

SEQ ID NO: 170 - DNA, 3158 bp, Homo sapiens; identical to SEQ ID NO: 165

SEQ ID NO: 171 - DNA, 1238 bp, Homo sapiens; identical to SEQ ID NO: 98

SEQ ID NO: 172 - DNA, 5901 bp, Homo sapiens; identical to SEQ ID NO: 109

SEQ ID NO: 173 - DNA, 1638 bp, Homo sapiens
atggattggggcactgagctgtgggatcagttcgaggtgctcgagcgccacacgcagtgggggctggacctgttggacagatatgtaaagttcgtgaaagaacgcaccgaagtggaacaggcttacgccaaacaactgcggagcctggtgaaaaaatatctgcccaagagacctgccaaggatgatcctgagtccaaattcagccagcaacagtccttcgtacagattctccaggaggtgaatgactttgcaggccagcgggagctggtggctgagaacctcagtgtccgtgtatgtcttgagctgaccaagtactcacaagagatgaaacaggagaggaagatgcacttccaagaagggcggcgggcccagcagcagctggaaaatggctttaaacagctggagaatagtaagcgtaaatttgagcgggactgccgggaggcagagaaggcagcccagactgctgaacggctagaccaggatatcaacgccaccaaggctgatgtggagaaggccaagcagcaagcccaccttcggagtcacatggccgaagaaagcaaaaacgaatatgcggctcaactgcagcgcttcaaccgagaccaagcccacttctatttttcacagatgccccagatattcgataagctccaagacatggatgaacgcagggccacccgcctgggtgccgggtatgggctcctgtcggaggccgagctggaggtggtgcccataatagccaagtgcttggagggcatgaaggtggctgcaaatgctgtggatcccaagaacgactcccacgtccttatagagctgcacaagtcaggttttgcccgcccgggcgacgtggaattcgaggacttcagccagcccatgaaccgtgcaccctccgacagcagtctgggcaccccctcggatggacggcctgaactccgaggcccgggtcgcagccgcaccaagcgctggccttttggcaagaagaacaagacagtggtgaccgaggattttagccacttgcccccagagcagcagcgaaaacggcttcaacagcagttggaagaacgcagtcgtgaacttcagaaggaggttgaccagagggaagccctaaagaaaatgaaggatgtctatgagaagacacctcagatgggggaccccgccagcttggagccccagatcgctgaaaccctgagcaacattgaacggctgaaattggaagtgcagaagtatgaggcgtggctggcagaagctgaaagtcgagtccttagcaaccggggagacagcctgagccggcacgcccggcctcccgacccccccgctagcgccccgccagacagcagcagcaacagcgcatcacaggacaccaaggagagctctgaagagcctccctcagaagagagccaggacacccccatttacacggagtttgatgaggatttcgaggaggaacccacatcccccataggtcactgtgtggccatctaccactttgaagggtccagcgagggcactatctctatggccgagggtgaagacctcagtcttatggaagaagacaaaggggacggctggacccgggtcaggcggaaagagggaggcgagggctacgtgcccacctcctacctccgagtcacgctcaattga

SEQ ID NO: 174 - DNA, 486 bp, Homo sapiens
atgtcggttccaggaccttaccaggcggccactgggccttcctcagcaccatccgcacctccatcctatgaagagacagtggctgttaacagttattaccccacacctccagctcccatgcctgggccaactacggggcttgtgacggggcctgatgggaagggcatgaatcctccttcgtattatacccagccagcgcccatccccaataacaatccaattaccgtgcagacggtctacgtgcagcaccccatcacctttttggaccgccctatccaaatgtgttgtccttcctgcaacaagatgatcgtgagtcagctgtcctataacgccggtgctctgacctggctgtcctgcgggagcctgtgcctgctggggtgcatagcgggctgctgcttcatccccttctgcgtggatgccctgcaggacgtggaccattactgtcccaactgcagagctctcctgggcacctacaagcgtttgtag

SEQ ID NO: 175 - DNA, 2280 bp, Homo sapiens
atgtcgaaacggctccggagcagcgaggtgtgcgctgactgcagcgggccggatccttcctgggcatcagtaaataggggaacgtttttatgtgatgagtgctgcagtgtccatcggagtctagggcgccatatctcccaagtgaggcatctgaaacacacaccgtggcctccaacactgcttcagatggttgagaccttgtataataacggtgctaactctatatgggagcattctttgctggaccctgcgtctattatgagtggaagacgtaaagctaatccacaggataaagtacatcccaataaagcggaattcatcagagccaagtatcagatgttagcgttcgtccatcgcttgccctgccgggatgacgatagtgtgactgccaaagatcttagcaagcaactccattcgagcgtgagaacagggaatcttgaaacctgtttgagactgttatctttaggagcacaagccaacttctttcatcctgaaaaaggaaacaccccactccatgttgcctccaaagcagggcagattttacaggctgaattattggcagtatatggagcagacccaggcacacaggattctagtgggaaaactcccgttgattatgcaaggcaaggagggcaccatgagctggcagagcgcctcgtggaaatacagtatgagctaacggacagactagccttctatctctgtggcaggaaaccagatcacaaaaatggacagcactttataatacctcaaatggcagacagcagcctggatttgtctgaattggcaaaagctgctaagaagaaacttcaatctctaagtaatcatttgtttgaagaacttgccatggatgtgtacgatgaagttgacaggcgagagacggatgcagtctggcttgccacgcaaaaccacagcgccctggtaaccgagacaacggtcgtcccctttcttccggtcaatcctgagtactcatcaacacgaaatcagggcagacagaagttagctcggttcaacgcccatgagtttgccacgctggtcattgacattctcagtgacgccaagaggagacagcagggcagttctctctcgggttcaaaagacaatgtggagctcatactgaaaaccatcaataaccagcacagcgttgagagtcaagacaacgatcagcccgactatgacagcgtggcatcagacgaagacacagatttggaaaccactgcaagcaaaacaaaccggcagaagagcctagattcagatttatcagatggaccagtcactgtacaggaatttatggaggtcaaaaacgctctagtggcttctgaggccaagatacagcagctaatgaaggtgaataacaacttgagtgacgagctgagaattatgcagaaaaagcttcaaacactccagagtgaaaattcgaacctcaggaaacaggccacaaccaatgtatatcaggtgcaaactggttctgagtacacagacacttccaaccactcttccttaaagagacgtccgtctgcccggggcagtaggcccatgtccatgtacgagaccggatcaggtcagaaaccatatctcccaatgggagaagcgagccgccccgaagagagcaggatgagactccagcccttccccgcgcacatcgggaggagtgcacttgtgacctcctcttcatctctgccttccttcccctccacactttcctggtcgagggacgaaagcgcccgaagggcatccaggctggagaagcagaacagcacacctgagagtgactacgacaacactcccaacgacatggagccagatggcatggggtcaagccgaaagggacggcaaagaagtatggtgtggccaggggatggcttggtaccagacacagcagaaccccatgtggccccaagccccactctccctagcaccgaagatgtcatcaggaagactgaacagatcaccaaaaacatacaggagctcttaagagcagcccaagaaaataaacatgacagttatattccctgctcagagaggatacacgtagctgttacagaaatggcagcattattccccaaaaaacccaagtctgatatggtgaggacttcccttcgtttactgacgtccagtgcctaccgactgcagtcagagtgcaagaagaccctcccaggggaccccggctcacccacagacgttcagctggtcacgcagcaggtcatccagtgtgcgtacgacatcgccaaggctgccaagcagctggttaccatcaccaccaaagagaacaacaactga

SEQ ID NO: 176 - DNA, 606 bp, Homo sapiens
atgggtaacctgttcggccgcaagaagcagagccgcgtcacggagcaggacaaggccatcctgcaactgaagcagcagcgggacaagctgaggcagtaccagaagaggatcgcccagcagctggagcgcgagcgcgccctggcccggcagctgctgcgggacggcaggaaggaacgggccaagctgctgctcaagaagaagcgataccaggagcagctcctggacaggacggagaaccagatcagcagcctggaggccatggttcagagtattgagttcacccagatcgaaatgaaagtgatggaggggctgcagtttggaaatgagtgtctgaacaagatgcaccaggtgatgtccattgaagaggtggagaggatcctggacgagacgcaggaggccgtggagtaccagcggcaaatagacgagctcctggcaggaagcttcactcaggaggatgaagacgccatcctggaggagctgagcgcaatcactcaggaacaaatagagctgccagaggttccctccgagccccttcctgagaagatcccagaaaacgtccctgtcaaggccaggcccaggcaggcggagctggtggcagcttcgtaa

SEQ ID NO: 177 - DNA, 1086 bp, Homo sapiens
atgtacggcaaaggcaagagtaacagcagcgccgtcccgtccgacagccaggcccgggagaagttagcactctacgtatatgaatatctgctccatgtaggagctcagaaatcagctcaaacatttttatcagagataagatgggaaaaaaacatcacattgggggaaccaccaggattcttacattcttggtggtgtgtattttgggatctctactgtgcagctccagagagacgtgaaacatgtgaacactcaagtgaagcaaaagccttccatgattacagtgctgcagcagctcccagtccagtgctaggaaacattcccccaggagatggcatgccagtaggtcctgtaccaccagggttctttcagccttttatgtcacctcggtaccctggaggtccaaggcccccattgaggatacctaatcaggcacttggaggtgtcccaggaagtcagccattactccccagtggaatggatccaactcgacaacaaggacatccaaatatgggtgggccaatgcagagaatgactcctccaagaggaatggtgcccttaggaccacagaactatggaggtgcaatgagacccccactgaatgctttaggtggccctggaatgcctggaatgaacatgggtccaggtggtggtagaccttggccaaacccaacaaatgccaattcaataccatactcctcagcatctcctgggaattatgtaggtcctccaggaggtggagggccaccaggaacacccatcatgcctagtccagcagattcaaccaactctggtgataacatgtatactttaatgaatgcagtacctcctggacctaacagacctaattttccaatgggtcctgggtcagatggtcccatgggtggattaggaggaatggagtcacatcacatgaatggctctttaggctcaggagatatggacagtatttccaagaattctcccaataatatgagcctgagtaatcaaccgggcactccaagggatgatggcgaaatggggggaaatttcttaaatccttttcagagtgagagttactcccctagcatgacaatgagcgtgtga

SEQ ID NO: 178 - DNA, 3192 bp, Homo sapiens
atgcctcatttgcctctcgcctcttttcgaccaccattttgggggctgaggcactcacggggcctccccaggtttcactccgtttctacacagtcggagccccatggatctcccatctcccggaggaaccgtgaagccaaacagaagcgcctgcgagagaagcaggcgactctggaggctgagatagcaggggagagcaagtcacctgcagaatccattaaggcctggaggcctaaggagttagtattgtatgaaatccctacgaaacccggtgaaaagaaagatgtctctgggcccctgcctcctgcatacagcccccgatatgttgaggctgcctggtacccgtggtgggtacgagagggcttcttcaaaccagaatatcaggcccggctgccccaagctacaggggagaccttttccatgtgtatcccacctcccaatgtcactggctccctgcacattggccacgcactcacggtggccatacaggatgccctcgtgcgctggcaccggatgcgtggggatcaagtgctgtgggtccctggttcagatcatgcaggaattgctacacaagctgtggtggagaaacaactgtggaaggaacggggagtgaggagacatgagctgagccgggaggccttccttagggaggtgtggcagtggaaggaggcgaaaggtggagagatctgtgagcagctgcgagctctgggtgcctccctggactgggatcgagagtgttttaccatggatgttggctcctcagtggctgtgactgaagcttttgtgcggctctacaaggcggggttgctgtaccggaaccatcagcttgtcaactggtcatgtgctttaagatcagccatctcggacattgaggtggagaaccggcccctgcctggccacacacagcttcgactgcctggctgccccacccccgtgtcttttggcctcctattttctgttgccttccccgtggatggagagcctgatgcagaggttgtggtaggaaccacaaggccagagacgctgcctggagatgtggctgtggccgttcatccagacgactcgcgatacacacatctacacgggcgacagcttcgtcaccccttgatggggcagcctcttcccctcatcacagactatgctgttcagccacatgtgggcacgggggcagtgaaggtgactccagctcacagtcctgccgatgctgagatgggggcccgacatggcttgagccccttgaatgtcattgcggaggatgggaccatgacctccctctgcggggactggctgcagggtcttcaccggtttgtggcccgggaaaagataatgtctgtgctgagtgaatggggcctgttccggggcctccagaaccaccccatggtactgcccatctgcagccgttctggggatgtgatagaatacctgctgaagaaccagtggtttgtccgctgccaggaaatgggggcccgagctgccaaggctgtggagtcgggggccctggagctcagtccctccttccaccagaagaactggcagcactggttttcccatattggggactggtgtgtctcccggcagctgtggtggggccatcagattccagcctacctggttgtagaggaccatgcgcagggagaagaggactgttgggtggttgggcggtcagaggctgaggccagagaggtagcagcggaactgacagggaggccaggggcagagctgaccctggagagggatcctgatgtcctagacacatggttttcttctgccctgttccccttttctgccctgggctggccccaagagaccccagaccttgctcgtttctaccccctgtcacttttggaaacgggcagcgaccttctgctgttctgggtgggccgcatggtcatgttggggacccagctcacagggcagctgcccttcagcaaggtgcttcttcatcccatggttcgggacaggcagggccggaagatgagcaagtccctggggaatgtgctggacccaagagacatcatcagtggggtggagatgcaggtgctgcaggaaaagctgagaagcggaaatttggaccctgcagagctggccattgtggctgcagcacagaaaaaggactttcctcacgggatccctgagtgtgggacagatgccctgagattcacactctgctcccatggagttcaggcgggcgacttgcacctgtcagtctctgaggtccagagctgccgacatttctgcaacaagatctggaatgctcttcgctttatcctcaatgctttaggggagaaatttgtgccacagcctgctgaggagctgtctccctcctccccgatggatgcctggatcctgagccgccttgccctggctgcccaggagtgtgagcggggcttcctcacccgagagctctcgctcgtcactcatgccctgcaccacttctggcttcacaacctctgtgacgtctacctggaggctgtgaagcccgtgctgtggcactcgccccgccccctggggccccctcaggtcctgttctcctgcgctgacctcggcctccgcctcctggccccactgatgcccttcctggctgaagagctctggcagaggctgccccccaggcctggttgcccccctgcccccagcatctcggttgccccctaccccagcgcctgcagcttggagcactggcgccagccagagctggagcggcgcttctcccgggtccaagaggtcgtgcaggtgctaagggctctccgagccacgtaccagctcaccaaagcccggccccgagtgctgctgcagagctcagagcctggggaccagggcctcttcgaggccttcttggagcccctgggcaccctgggctactgtggggctgtgggcctgttacccccaggcgcagcagctccctccggctgggcccaggctccactcagtgacacggctcaagtctacatggagctgcagggcctggtggacccgcagatccagctacctctgttagccgcccgaaggtacaagttgcagaagcagcttgatagcctcacagccaggaccccatcagaaggggaggcagggactcagaggcaacaaaagctttcttccctccagctggaattgtcaaaactggacaaggcagcctctcacctccagcagctgatggatgagcctccagccccagggagcccggagctctaa

SEQ ID NO: 179 - DNA, 1395 bp, Homo sapiens
atggaaactgaacagccagaagaaaccttccctaacactgaaaccaatggtgaatttggtaaacgccctgcagaagatatggaagaggaacaagcatttaaaagatctagaaacactgatgagatggttgaattacgcattctgcttcagagcaagaatgctggggcagtgattggaaaaggaggcaagaatattaaggctctccgtacagactacaatgccagtgtttcagtcccagacagcagtggccccgagcgcatattgagtatcagtgctgatattgaaacaattggagaaattctgaagaaaatcatccctaccttggaagagggcctgcagttgccatcacccactgcaaccagccagctcccgctcgaatctgatgctgtggaatgcttaaattaccaacactataaaggaagtgactttgactgcgagttgaggctgttgattcatcagagtctagcaggaggaattattggggtcaaaggtgctaaaatcaaagaacttcgagagaacactcaaaccaccatcaagcttttccaggaatgctgtcctcattccactgacagagttgttcttattggaggaaaacccgatagggttgtagagtgcataaagatcatccttgatcttatatctgagtctcccatcaaaggacgtgcacagccttatgatcccaatttttacgatgaaacctatgattatggtggttttacaatgatgtttgatgaccgtcgcggacgcccagtgggatttcccatgcggggaagaggtggttttgacagaatgcctcctggtcggggtgggcgtcccatgcctccatctagaagagattatgatgatatgagccctcgtcgaggaccacctccccctcctcccggacgaggcggccggggtggtagcagagctcggaatcttcctcttcctccaccaccaccacctagagggggagacctcatggcctatgacagaagagggagacctggagaccgttacgacggcatggttggtttcagtgctgatgaaacttgggactctgcaatagatacatggagcccatcagaatggcagatggcttatgaaccacagggtggctccggatatgattattcctatgcagggggtcgtggctcatatggtgatcttggtggacctattattactacacaagtaactattcccaaagatttggctggatctattattggcaaaggtggtcagcggattaaacaaatccgtcatgagtcgggagcttcgatcaaaattgatgagcctttagaaggatccgaagatcggatcattaccattacaggaacacaggaccagatacagaatgcacagtatttgctgcagaacagtgtgaagcagtatgcagatgttgaaggattctaa

SEQ ID NO: 180 - DNA, 546 bp, Homo sapiens
atggggaacatcttcgccaacctcttcaagggcctttttggcaaaaaagaaatgcgcatcctcatggtgggcctggatgctgcagggaagaccacgatcctctacaagcttaagctgggtgagatcgtgaccaccattcccaccataggcttcaacgtggaaaccgtggagtacaagaacatcagcttcactgtgtgggacgtgggtggccaggacaagatccggcccctgtggcgccactacttccagaacacacaaggcctgatcttcgtggtggacagcaatgacagagagcgtgtgaacgaggcccgtgaggagctcatgaggatgctggccgaggacgagctccgggatgctgtcctcctggtgttcgccaacaagcaggacctccccaacgccatgaatgcggccgagatcacagacaagctggggctgcactcactacgccacaggaactggtacattcaggccacctgcgccaccagcggcgacgggctctatgaaggactggactggctgtccaatcagctccggaaccagaagtga

SEQ ID NO: 181 - DNA, 3453 bp, Homo sapiens
atgaagctgaaaaagcaggtgacagtgtgtggggctgccatcttctgtgtggcagtcttctcgctctacctcatgctggaccgagtgcaacacgatcccacccgacaccagaatggtgggaacttcccccggagccaaatttctgtgctgcagaaccgcattgagcagctggagcagcttttggaggagaaccatgagattatcagccatatcaaggactccgtgctggagctgacagccaacgcagagggcccgcccgccatgctgccctactacacggtcaatggctcctgggtggtgccaccggagccccggcccagcttcttctccatctccccgcaggactgccagtttgctttggggggccggggtcagaagccagagctgcagatgctcactgtgtcggaggagctgccgtttgacaacgtggatggtggtgtgtggaggcaaggcttcgacatctcctacgacccgcacgactgggatgctgaagacctgcaggtgtttgtggtgccccactctcacaatgacccaggctggatcaagacctttgacaagtactacacagagcagacccaacacatcctcaatagcatggtgtctaagctgcaggaggacccccggcggcgcttcctctgggcagaggtctccttcttcgccaagtggtgggacaacatcaatgtccaaaagagagcggcagtccgaaggctggtgggaaacgggcagctggagattgcgacaggaggctgggtgatgccagatgaggccaattcccactactttgcattgattgaccagctcatcgaaggacaccagtggctggagagaaatcttggtgcaaccccccgctctggctgggcagtggacccctttggatacagctccaccatgccttacctgctgcgccgtgccaacctcaccagcatgctgattcagagagtgcactatgccatcaagaagcactttgctgccacccacagcctagagttcatgtggaggcagacatgggactcggactccagcacagacatcttctgtcacatgatgcccttctacagctatgacgtcccccatacctgtggcccagatcccaagatctgctgccaatttgatttcaaacgcctgcctggtgggcgcatcaactgcccttggaaggtgccaccccgggccatcacagaggccaacgtggcagagagggcagccctgcttctggaccaataccggaagaagtcccagctgttccgaagcaacgtcctcctggtgcctcttggagatgacttccgatatgacaagccccaggagtgggatgcccagttcttcaactaccaacggctctttgacttcttcaacagcaggcctaacctccatgtgcaggcccagtttggcactctttctgactattttgatgccctgtacaagaggacaggggtggagccaggggcccggcctccagggtttcctgtgctgagcggggatttcttctcctatgcggaccgggaggatcattactggacaggctattacacttcccggcccttctacaagagcttagaccgagtcctggaagcccacctgcggggggcagaggttctgtacagcctggctgcagctcacgctcgccgctctggtctggctggccggtacccactgtctgatttcaccctcctgacggaagctcggcgcacattggggctcttccagcatcacgatgccatcactggcacggccaaggaggctgtggtggtggactatggggtcaggcttctgcgctcccttgtcaacctgaagcaggtcatcattcatgcagcccactatctggtgctgggggacaaggagacctaccactttgaccctgaggcgcccttcctccaagtggatgacactcgcttaagtcacgacgccctcccagagcgcacggtgatccagctggattcctcgcccaggtttgtggtcctattcaacccactggaacaggagcgattcagcatggtgtccctgctggtcaactctccccgcgtgcgtgtcctttcggaggagggtcagcccctggccgtgcagatcagcgcacactggagctctgccaccgaggcggtccctgacgtctaccaggtgtctgtgcctgtccgcctgccagccctgggcctgggcgtgctgcagctacagctgggcctggatgggcaccgcacgctgccctcctctgtgcgcatctacctgcacggccggcagctgtccgtcagcaggcacgaagcgtttcctctccgtgtcattgactctggcaccagcgacttcgccctcagcaaccgctacatgcaggtctggttctcaggccttactgggctcctcaagagcatccgaagggtggatgaggagcacgagcagcaggtggacatgcaggtccttgtctatggcacccgtacgtccaaagacaagagtggagcctacctcttcctgcccgatggcgaggccaagccctacgtccccaaggagccccccgtgctgcgtgtcactgaaggccctttcttctcagaggtggttgcgtactatgagcacattcaccaggcggtccggctttacaatctgccaggggtggaggggctgtctctggacatatcatccctggtggacatccgggactacgtcaacaaggagctggccctgcacatccatacagacatcgacagccagggtatcttcttcacagacctcaatggctttcaggtgcagccccgacggtatctgaagaagctccccctccaggccaacttctaccccatgccagtcatggcctatatccaggacgcacagaagcgcctcacgctgcacactgcccaggccctgggtgtctctagcctcaaagatggccagctggaggtgatcttggaccggcggctgatgcaggatgacaaccggggcctaggccaagggctcaaggacaacaagagaacctgcaaccgtttccgcctcctgctagagcggcgaaccgtgggcagtgaggtccaagatagccactctaccagctacccatccctcctcagccacctgacctccatgtacctgaacgccccggcgctcgctctgcctgtagccaggatgcagctcccaggccctggtctgcgctcatttcatcctctggcttcctcactgccctgtgacttccacctgctcaacctacgtacgctccaggctgaggaggacaccctaccctcggcggagaccgcactcatcttacaccgcaagggttttgactgcggcctggaggccaagaacttgggcttcaactgcaccacaagccaaggcaaggtagccctgggcagccttttccatggcctggatgtggtattccttcagccaacctccttgacgttactgtaccctctggcctccccgtccaacagcactgacgtctatttggagcccatggagattgctacctttcgcctccgcttgggttag

SEQ ID NO: 182 - DNA, 1086 bp, Homo sapiens
atggcccagcccggggacccgcggcgcctctgcaggctggtgcaggagggccggctgcgcgccctgaaggaggagctgcaggcggccgggggctgcccggggccggccggggataccctcctgcactgcgccgcgcgccacgggcatcgggacgtgctggcctatctggccgaggcctggggcatggacatcgaggccaccaaccgagactacaagcggcctctgcacgaggcggcctccatgggccaccgagactgcgtgcgctacctgctgggccggggggcagcggtcgactgcctgaagaaggccgactggactcctctgatgatggcctgcacaaggaagaacctgggggtgatccaggagctggtggaacatggcgccaatccactcctgaagaacaaagatggctggaacagtttccacattgccagtcgagaaggcgaccctctgatcctccagtacctgctcactgtttgcccaggtgcctggaagacagagagcaaaattagaaggactcctctgcatactgcagcaatgcatggccatttggaggcagtcaaggtgcttcttaagaggtgccaatatgaaccagactacagagacaactgtggcgtcaccgccttgatggacgcaatccagtgtgggcacatcgacgtcgctaggctgctcctcgatgaacatggggcttgcctttcagcagaagacagcctgggtgcccaggctctgcacagggcagctgtcacagggcaggacgaagccatccgattcttggtctctgaacttggcgtcgatgtagatgtgagagccacatcaacccacctcacagcacttcattatgcagctaaggaaggacatacaagtacaattcagactctcttatccttgggagctgacatcaattctaaagatgaaaaaaatcgatcagccctgcatctggcctgtgcaggtcagcacttggcctgtgccaagtttctcctgcagtcgggactgaaggattctgaagacatcacgggcaccctggctcagcagctcccaaggagagcagatgtccttcagggctctggccatagcgcaatgacataa

SEQ ID NO: 183 - protein, 183 aa, Homo sapiens [sequence omitted]

SEQ ID NO: 184 - protein, 149 aa, Homo sapiens
EGIQALDEVIFSLETYDITTVRASVGMYLISKYIRKNTDSVVIFSGEGSDELTQGYIYFHKAPSPEKAEEESERLLRELYLFDVLRADRTTAAHGLELRVPFLDHRFSSYYLSLPPEMRIPKNGIEKHLLRETFEDSNLIPKEILWRPK

SEQ ID NO: 185 - protein, 357 aa, Homo sapiens
  misc_feature (288)..(289): Xaa can be any naturally occurring amino acid
  misc_feature (291)..(292): Xaa can be any naturally occurring amino acid
  misc_feature (297)..(297): Xaa can be any naturally occurring amino acid
  misc_feature (299)..(299): Xaa can be any naturally occurring amino acid
  misc_feature (306)..(306): Xaa can be any naturally occurring amino acid
  misc_feature (311)..(311): Xaa can be any naturally occurring amino acid
  misc_feature (316)..(316): Xaa can be any naturally occurring amino acid
  misc_feature (327)..(327): Xaa can be any naturally occurring amino acid
  misc_feature (330)..(330): Xaa can be any naturally occurring amino acid
  misc_feature (333)..(333): Xaa can be any naturally occurring amino acid
  misc_feature (337)..(337): Xaa can be any naturally occurring amino acid
  misc_feature (344)..(344): Xaa can be any naturally occurring amino acid
  misc_feature (346)..(351): Xaa can be any naturally occurring amino acid
  misc_feature (353)..(354): Xaa can be any naturally occurring amino acid
  misc_feature (357)..(357): Xaa can be any naturally occurring amino acid
ALRGMEGTAVAVFEILRFLIIHWKCDIDVSKGALLEGQLVISIEGLNSKHQANALHCVTTIASAGSLFGGMVLKKFLKVPAPKLQTSEGFYASGFSFPPEFHHSGNQSKLCLLRTPHPQPEVQGPRGRRGPGRRTRAQTEQPEGRAHSRGAGQELPERRGGPRGCGSRRRRSPAYGALSAAVAAWRRGLRTCADAKDNPGLETVSNSWAQVILLPQPPKLLGLQTATAPSLLHVFRDKLLGNLGIKSLAHHDVQIPEFQFHCNAIVSRCSVGYGKIGHLSQLLRGIFXXPXXQGYSXLXSQHCTLXRATKXCLQKXNKNLYGKKNPXKPXPIXKKSXGMGLPDXKXXXXXXFXXGNX

SEQ ID NO: 186 - protein, 378 aa, Homo sapiens
  misc_feature (230)..(230): Xaa can be any naturally occurring amino acid
  misc_feature (256)..(256): Xaa can be any naturally occurring amino acid
  misc_feature (261)..(261): Xaa can be any naturally occurring amino acid
  misc_feature (289)..(289): Xaa can be any naturally occurring amino acid
  misc_feature (293)..(293): Xaa can be any naturally occurring amino acid
  misc_feature (304)..(304): Xaa can be any naturally occurring amino acid
  misc_feature (310)..(310): Xaa can be any naturally occurring amino acid
  misc_feature (317)..(317): Xaa can be any naturally occurring amino acid
  misc_feature (332)..(332): Xaa can be any naturally occurring amino acid
  misc_feature (335)..(335): Xaa can be any naturally occurring amino acid
  misc_feature (342)..(343): Xaa can be any naturally occurring amino acid
  misc_feature (345)..(346): Xaa can be any naturally occurring amino acid
  misc_feature (349)..(349): Xaa can be any naturally occurring amino acid
  misc_feature (352)..(352): Xaa can be any naturally occurring amino acid
  misc_feature (354)..(354): Xaa can be any naturally occurring amino acid
  misc_feature (357)..(358): Xaa can be any naturally occurring amino acid
  misc_feature (361)..(361): Xaa can be any naturally occurring amino acid
  misc_feature (367)..(367): Xaa can be any naturally occurring amino acid
  misc_feature (370)..(370): Xaa can be any naturally occurring amino acid
  misc_feature (374)..(374): Xaa can be any naturally occurring amino acid
  misc_feature (376)..(376): Xaa can be any naturally occurring amino acid
  misc_feature (378)..(378): Xaa can be any naturally occurring amino acid
AHASGGSPRMGEFNEKKTTCGTVCLKYLLFTYNCCFWLAGLAVMAVGIWTLALKSDYISLLASGTYLATAYILVVAGTVVMVTGVLGCCATFKERRNLLRLYFILLLIIFLLEIIAGILAYAYYQQLNTELKENLKDTMTKRYHQPGHEAVTSAVDQLQQEFHCCGSNNSQDWRDSEWIRSQEAGGRVVPDSCCKTVVALCGQRDHASNIYKVEGGCITKLETFIQEHLXVIGGCGDRHCLCAGLWHDLHVLPVQXSQAGXLLTLPWALLLLHPTTELKPLNTRGWAPXPPVXSPYLWGTQPQXQLQCLXLPTMPTXKRGLAGQIWGGFLGXSPXKTLCLGXXKXXKGXFFXWXKGXXFPXKGEKPXHPXPLKXGXFX

SEQ ID NO: 187 - protein, 344 aa, Homo sapiens
  misc_feature (267)..(267): Xaa can be any naturally occurring amino acid
  misc_feature (270)..(270): Xaa can be any naturally occurring amino acid
  misc_feature (282)..(282): Xaa can be any naturally occurring amino acid
  misc_feature (288)..(288): Xaa can be any naturally occurring amino acid
  misc_feature (291)..(291): Xaa can be any naturally occurring amino acid
  misc_feature (294)..(294): Xaa can be any naturally occurring amino acid
  misc_feature (296)..(296): Xaa can be any naturally occurring amino acid
  misc_feature (302)..(302): Xaa can be any naturally occurring amino acid
  misc_feature (304)..(304): Xaa can be any naturally occurring amino acid
  misc_feature (307)..(307): Xaa can be any naturally occurring amino acid
  misc_feature (310)..(310): Xaa can be any naturally occurring amino acid
  misc_feature (313)..(315): Xaa can be any naturally occurring amino acid
  misc_feature (317)..(318): Xaa can be any naturally occurring amino acid
  misc_feature (320)..(322): Xaa can be any naturally occurring amino acid
  misc_feature (326)..(327): Xaa can be any naturally occurring amino acid
  misc_feature (329)..(330): Xaa can be any naturally occurring amino acid
  misc_feature (334)..(334): Xaa can be any naturally occurring amino acid
  misc_feature (337)..(337): Xaa can be any naturally occurring amino acid
AHASGSAAQCQRQRQTRAPRSPARRLPWDSRARTPALPVRCPSMELLCCEGTRHAPRAGPDPRLLGDQRVLQSLLRLEERYVPRASYFQCVQREIKPHMRKMLAYWMLEVCEEQRCEEEVFPLAMNYLDRYLSCVPTRKAQLQLLGAVCMLLASKLRETTPLTIEKLCIYTDHAVSPRQLRDWEVLVLGKLKWDLAAVIAHDFLAFILHRLSLPRDRQALVKKHAQTFLALCATDYTFAMYPPSMIATGSIGAAVQGLGACSMSGDXLTXLLAGITGTEVEXPAGLSXTNXTAXRXTSGNRXNXSAXAKXPGXXXQXXNXXXILKXXNXXFYPXKAXGRAIKKK

SEQ ID NO: 188 - protein, 458 aa, Homo sapiens
  misc_feature (252)..(252): Xaa can be any naturally occurring amino acid
  misc_feature (284)..(284): Xaa can be any naturally occurring amino acid
  misc_feature (422)..(422): Xaa can be any naturally occurring amino acid
  misc_feature (434)..(434): Xaa can be any naturally occurring amino acid
  misc_feature (448)..(448): Xaa can be any naturally occurring amino acid
PTRPPTRPLRSSERCVLESLRPCVRLRPEASAARGFCCEPETMAKPAQGAKYRGSIHDFPGFDPNQDAEALYTAMKGFGSDKEAILDIITSRSNRQRQEVCQSYKSLYGKDLIADLKYELTGKFERLIVGLMRPPAYCDAKEIKDAISGIGTDEKCLIEILASRTNEQMHQLVAAYKDAYERDLEADIIGDTSGHFQKMLVVLLQGNQGGGRSERGPGTTGCPGPIRGRGTEMGNRSPVHLHLGKSQQALFXVGGPVSEDHREAEWNQHRRGLVRGTLRSCWPXKGSRSPRNILLKGSSRLRAWGLRNKPSPSWPPEGSHAPHSGNLPDKYESPSTDDQNDTSARTKICTSWGNIILCQFSRGTQCPSKGTYAGPKIKEMAPPMSPRPNQTLKTKESLKKNLLIPPPFPENPTSLFSDNKQXIFTPVLLYPPPXKTGRRKHISPPPPXRNLTVYYPSL

SEQ ID NO: 189 - protein, 305 aa, Homo sapiens
  misc_feature (209)..(209): Xaa can be any naturally occurring amino acid
  misc_feature (215)..(215): Xaa can be any naturally occurring amino acid
  misc_feature (218)..(218): Xaa can be any naturally occurring amino acid
  misc_feature (236)..(236): Xaa can be any naturally occurring amino acid
  misc_feature (241)..(241): Xaa can be any naturally occurring amino acid
  misc_feature (245)..(245): Xaa can be any naturally occurring amino acid
  misc_feature (250)..(250): Xaa can be any naturally occurring amino acid
  misc_feature (252)..(252): Xaa can be any naturally occurring amino acid
  misc_feature (255)..(255): Xaa can be any naturally occurring amino acid
  misc_feature (257)..(257): Xaa can be any naturally occurring amino acid
  misc_feature (260)..(261): Xaa can be any naturally occurring amino acid
  misc_feature (264)..(264): Xaa can be any naturally occurring amino acid
  misc_feature (268)..(269): Xaa can be any naturally occurring amino acid
  misc_feature (277)..(278): Xaa can be any naturally occurring amino acid
  misc_feature (280)..(282): Xaa can be any naturally occurring amino acid
  misc_feature (285)..(285): Xaa can be any naturally occurring amino acid
  misc_feature (289)..(289): Xaa can be any naturally occurring amino acid
  misc_feature (292)..(292): Xaa can be any naturally occurring amino acid
  misc_feature (294)..(295): Xaa can be any naturally occurring amino acid
  misc_feature (298)..(301): Xaa can be any naturally occurring amino acid
  misc_feature (305)..(305): Xaa can be any naturally occurring amino acid
GERGELPPPPAPRRPRPPGPRRRGPRMALEEKSAPLHPPLSHRAAPASSFCVAGSGGTRNGRPLTPPSAAASSSSSTSTSFSSSSSASSSAPGRSGVSAAAGSGGDSRFSGRRRLAMSCRGRAAEPRGLGAAAAPTIRGAGMTGNPDLDAKHHKGSMLHSMRFLRTDSASADPGNLKYSSSRDRGGSSSYGLQPSNSAVVSRQRHDDTXVHADIXNDXKGGYSVNGGSGENTYGRXSLGQXLKGXCDQPXHXCSXWXSCXXHKXMRKXXEKSMSYCXXSXXXIFXEDHXEKXKXXKLXXXXLKKX

SEQ ID NO: 190 - protein, 271 aa, Homo sapiens
  MISC_FEATURE (1)..(271): Xaa can be any naturally occuring amino acid
APSLYPKNTDLFEMIEKMQGSRMDEQRCSFPPPLKTEEDYIPYPSVHEVLGREGPFPLILLPQFGGYWIEGTNHEITSIPETEPLQSPTTKVKLECNPTARIYRKHFLGKEHFNYYSLDTALGHLVFSLKYDVIGDQEHLRLLLRTKCRTYHDVIPISCLTEFPNVVQMAKLVCEDVNVDRFYPCALPPRXPGSSFTFXRACHQAXNFQVWGSFYQKAXGXTSXGXNXFXXPMGEKSPPFRGXXPWKFPWXXKGSXXGRDXLKGVSXXEGX

SEQ ID NO: 191 - protein, 368 aa, Homo sapiens
  MISC_FEATURE (1)..(368): Xaa can be any naturally occuring amino acid
GGFLDDCVDPCCDSLTCQLRPGAQCASDGPCCQNCQLRPSGWQCRPTRGDCDLPEFCPGDSSQCPPDVSLGDGEPCAGGQAVCMHGRCASYAQQCQSLWGPGAQPAAPLCLQTANTRGNAFGSCGRNPSGSYVSCTPRDAICGQLQCQTGRTQPLLGSIRDLLWETIDVNGTELNCSWVHLDLGSDVAQPLLTLPGTACGPGLVCIDHRCQRVDLLGAQECRSKCHGHGVCDSNRHCYCEEGWAPPDCTTXLKATSSLNHRAAPQPPGLIGPGDAWCXLLXPCPPAXXXLPTQGTHLPXXGNPNLXPXEXAXNLPKRPLLAQXLNKVMXXTSRXPXSXXCPTXFQKKSNXKGXXNPXPQKNXXXXTXX

SEQ ID NO: 192 - protein, 273 aa, Homo sapiens
  MISC_FEATURE (1)..(273): Xaa can be any naturally occuring amino acid
GALQLHPEPELPSRRGTGAAGVWTGVAMIRFILIQNRAGKTRLAKWYMQFDDDEKQKLIEEVHAVVTVRDAKHTNFVEFRNFKIIYRRYAGLYFCICVDVNDNNLAYLEAIHNFVEVLNEYFHNVCELDLVFNFYKVYTVVDEMFLAGEIRETSQTKVLKQLLMLQSLEGQASPTPAPAPPGLACSLPLPRPVANPAVLPSAAEEGTQLGLGHKGGDCTPLPLGPGCGQRPPCVSRVTVPLSCDAIKRLCVXSPINLWSCLAKXKXXXXXXXX

SEQ ID NO: 193 - protein, 348 aa, Homo sapiens
  MISC_FEATURE (1)..(348): Xaa can be any naturally occuring amino acid
GLGSRLGLRGCFGAARLLYPRFQSRGPQGVEDGDRPQPSSKTPRIPKIYTKTGDKGFSSTFTGERRPKDDQVFEAVGTTDELSSAIGFALELVTEKGHTFAEELQKIQCTLQDVGSALATPCSSAREAHLKYTTFKAGPILELEQWIDKYTSQLPPLTAFILPSGGKISSALHFCRAVCRRAERRVVPLVQMGETDANVAKFLNRLSDYLFTLARYAAMKEGNQEKIYKKNDPSAESEGLNHRKWELGXSLHGDGRXKRNLPFWGPGSRAXPXRLKAXFLSQPQLLIYPSXXLPQGXXEPFGDFCPTXFPXXXGFWKXXEXIXLCRKXGXXXXPXKRTWXKXXNLXXW

SEQ ID NO: 194 - protein, 267 aa, Homo sapiens
  misc_feature (188)..(188): Xaa can be any naturally occurring amino acid
  misc_feature (192)..(192): Xaa can be any naturally occurring amino acid
  misc_feature (194)..(194): Xaa can be any naturally occurring amino acid
  misc_feature (198)..(199): Xaa can be any naturally occurring amino acid
  misc_feature (211)..(212): Xaa can be any naturally occurring amino acid
  misc_feature (216)..(216): Xaa can be any naturally occurring amino acid
  misc_feature (218)..(218): Xaa can be any naturally occurring amino acid
  misc_feature (225)..(225): Xaa can be any naturally occurring amino acid
  misc_feature (229)..(230): Xaa can be any naturally occurring amino acid
  misc_feature (232)..(232): Xaa can be any naturally occurring amino acid
  misc_feature (240)..(241): Xaa can be any naturally occurring amino acid
  misc_feature (243)..(243): Xaa can be any naturally occurring amino acid
  misc_feature (246)..(246): Xaa can be any naturally occurring amino acid
  misc_feature (248)..(252): Xaa can be any naturally occurring amino acid
  misc_feature (254)..(254): Xaa can be any naturally occurring amino acid
  misc_feature (256)..(256): Xaa can be any naturally occurring amino acid
  misc_feature (259)..(261): Xaa can be any naturally occurring amino acid
  misc_feature (266)..(267): Xaa can be any naturally occurring amino acid
ETVKRVLGFSEPTVVTAALNCVGKGMDKKKAADHLKPFLDDSTLRFVDKLFEAVEEGRSSRHSKSSSDRSRKRELKEFQEALAPGRGYVLAKHEPSRGDVTQSLPPEVFGDDSEISKESSGVKKRRIPRFEEVEEEPEVIPGPPSESPGHADAPDQTDDGGSNTTNRGEEKTAELHPPLHLQAKKLLXFLPXQXRTFXXGQTPISRPFPRXXPLFXNXWPFEERXREKXXWXLASLRNSXXPXLGXWXXXXXFXGXWPXXXGGPGXX

SEQ ID NO: 195 - protein, 253 aa, Homo sapiens
  misc_feature (135)..(135): Xaa can be any naturally occurring amino acid
  misc_feature (154)..(154): Xaa can be any naturally occurring amino acid
  misc_feature (175)..(175): Xaa can be any naturally occurring amino acid
  misc_feature (181)..(181): Xaa can be any naturally occurring amino acid
  misc_feature (187)..(188): Xaa can be any naturally occurring amino acid
  misc_feature (190)..(190): Xaa can be any naturally occurring amino acid
  misc_feature (192)..(192): Xaa can be any naturally occurring amino acid
  misc_feature (196)..(196): Xaa can be any naturally occurring amino acid
  misc_feature (199)..(199): Xaa can be any naturally occurring amino acid
  misc_feature (202)..(202): Xaa can be any naturally occurring amino acid
  misc_feature (209)..(210): Xaa can be any naturally occurring amino acid
  misc_feature (212)..(212): Xaa can be any naturally occurring amino acid
  misc_feature (215)..(216): Xaa can be any naturally occurring amino acid
  misc_feature (218)..(218): Xaa can be any naturally occurring amino acid
  misc_feature (220)..(220): Xaa can be any naturally occurring amino acid
  misc_feature (224)..(224): Xaa can be any naturally occurring amino acid
  misc_feature (229)..(230): Xaa can be any naturally occurring amino acid
  misc_feature (235)..(236): Xaa can be any naturally occurring amino acid
  misc_feature (240)..(241): Xaa can be any naturally occurring amino acid
  misc_feature (244)..(244): Xaa can be any naturally occurring amino acid
  misc_feature (246)..(249): Xaa can be any naturally occurring amino acid
  misc_feature (251)..(251): Xaa can be any naturally occurring amino acid
  misc_feature (253)..(253): Xaa can be any naturally occurring amino acid
AGGQGRRTAGGGGGGGAGVGAGAGAMEAERGPERRPAERSSPGQTPEEGAQALAEFAALHGPALRASGVPERYWGRLLHKLEHEVFDAGEVFGIMQVEEVEEEEDEAAREVRKQQPNPGNELCYKVIVTRESGLXAAHPNSIFLIDHAWTCRVXHARQQLQQVPGLLHRMANLMXIDFHGXLPSTAXXLXLXEMWXFNXTYXLAHGTAXXKXPVXXIXDXFSSXIHQSXXAQTSXXQPSXXNCXKXXXXNXLX

SEQ ID NO: 196 - protein, 374 aa, Homo sapiens
  MISC_FEATURE (1)..(374): Xaa can be any naturally occuring amino acid
AHASENVEMVEGDQGQMCINMEWGAFGDNGCLDDIRTHYDRLVDEYSLNAGKQRYEKMISGMYLGEIVRNILIDFTKKGFLFRGQISETLKTRGIFETKFLSQIESDRLALLQVRAILQQLGLNSTCDDSILVKTVCGVVSRRAAQLCGAGMAAVVDKIRENRGLDRLNVTVGVDGTLYKLHPHFSRIMHQTVKELSPKCNVSFLLSEDGSGKGAALITAVGVRLRTEASSESGIPSLLPLQHFSLQAATPYPPSELRWXTLAPGPAGAGKESKIQLMVYIVGYXIXRXLXXISLTRXPSSLALXLCMVFPGPXVXXGRASISXXAFPXKXFXGWKGXSXXXXNXXVXFEPXSXXPQREFDXXGXPNXDFPXLR

SEQ ID NO: 197 - protein, 278 aa, Homo sapiens [sequence omitted]

SEQ ID NO: 198 - protein, 352 aa, Homo sapiens
  misc_feature (273)..(273): Xaa can be any naturally occurring amino acid
  misc_feature (278)..(278): Xaa can be any naturally occurring amino acid
  misc_feature (286)..(287): Xaa can be any naturally occurring amino acid
  misc_feature (292)..(292): Xaa can be any naturally occurring amino acid
  misc_feature (296)..(296): Xaa can be any naturally occurring amino acid
  misc_feature (301)..(301): Xaa can be any naturally occurring amino acid
  misc_feature (303)..(303): Xaa can be any naturally occurring amino acid
  misc_feature (305)..(305): Xaa can be any naturally occurring amino acid
  misc_feature (310)..(310): Xaa can be any naturally occurring amino acid
  misc_feature (316)..(316): Xaa can be any naturally occurring amino acid
  misc_feature (318)..(318): Xaa can be any naturally occurring amino acid
  misc_feature (320)..(320): Xaa can be any naturally occurring amino acid
  misc_feature (324)..(325): Xaa can be any naturally occurring amino acid
  misc_feature (333)..(333): Xaa can be any naturally occurring amino acid
  misc_feature (341)..(341): Xaa can be any naturally occurring amino acid
  misc_feature (347)..(347): Xaa can be any naturally occurring amino acid
  misc_feature (349)..(351): Xaa can be any naturally occurring amino acid
GDVSNLDPNFSFEGTKLDVGNIVLALYSGLFAYGGWNYLNFVTEEMINPYRNLPLAIIISLPIVTLVYVLTNLAYFTTLSTEQMLSSEAVAVDFGNYHLGVMSWIIPVFVGLSCFGSVNGSLFTSSRLFFVGSREGHLPSILSMIHPQLLTPVPSLVFTCVMTLLYAFSKDIFSVINFFSFFNWLCVALAIIGMIWLRHRKPELERPIKVNLALPVFFILACLFLIAVSFWKTPVECGIGFTIILSGLPVYFFGVWWKKQAQVAPPGHLLHEXSCVKXSCRWSPRXXNQEAXWLPXEHAQXPXKXNHLLXPLGFPXPXLXAHPXXSPSLQVGXGSCCKNLXKISSLXEXXXP

SEQ ID NO: 199 - protein, 300 aa, Homo sapiens
AGTAHLPASPPVRSPARWGSMAGSPLLWGPRAGGVGLLVLLLLGLFRPPPALCARPVKEPRGLSAASPPLAETGAPRRFRRSVPRGEAAGAVQELARALAHLLEAERQERARAEAQEAEDQQARVLAQLLRVWGAPRNSDPALGLDDDPDAPAAQLARALLRARLDPAALAAQLVPAPVPAAALRPRPPVYDDGPAGPDAEEAGDETPDVDPELLRYLLGRILAGSADSEGVAAPRRLRRAADHDVGSELPPEGVLGALLRVKRLETPAPQVPARRLLPPALPGSRAPWDPEVPPPSRHQ

SEQ ID NO: 200 - protein, 240 aa, Homo sapiens
  misc_feature (142)..(142): Xaa can be any naturally occurring amino acid
  misc_feature (162)..(162): Xaa can be any naturally occurring amino acid
  misc_feature (171)..(171): Xaa can be any naturally occurring amino acid
  misc_feature (181)..(181): Xaa can be any naturally occurring amino acid
  misc_feature (185)..(185): Xaa can be any naturally occurring amino acid
  misc_feature (190)..(190): Xaa can be any naturally occurring amino acid
  misc_feature (196)..(196): Xaa can be any naturally occurring amino acid
  misc_feature (201)..(201): Xaa can be any naturally occurring amino acid
  misc_feature (203)..(203): Xaa can be any naturally occurring amino acid
  misc_feature (205)..(206): Xaa can be any naturally occurring amino acid
  misc_feature (208)..(209): Xaa can be any naturally occurring amino acid
  misc_feature (212)..(212): Xaa can be any naturally occurring amino acid
  misc_feature (218)..(220): Xaa can be any naturally occurring amino acid
  misc_feature (222)..(222): Xaa can be any naturally occurring amino acid
  misc_feature (225)..(225): Xaa can be any naturally occurring amino acid
  misc_feature (229)..(230): Xaa can be any naturally occurring amino acid
  misc_feature (234)..(236): Xaa can be any naturally occurring amino acid
  misc_feature (238)..(238): Xaa can be any naturally occurring amino acid
  misc_feature (240)..(240): Xaa can be any naturally occurring amino acid
KGAAGRGAGAPALPGNGFPVPAESAGAEGTDPDSPQPPNRQAMAPTGLLVAGASFLAFRGLHWGLRRLPTPESAARDRWQWWNLCVSLAHSLLSGTGALLGLSLYPQMAADPIHGHPRWALVLVAVSVGYFLADGADLLWNXTLGKTWDLLCHHLVVVSCLXTAVLSGHYXGFSMVSLLLXLNSXLGNKXRLLSLXKKKKXEXLXXFXXFIXSSSSLXXXLXFFXLKKXXSFQXXXNXKX

SEQ ID NO: 201 - protein, 370 aa, Homo sapiens
  misc_feature (239)..(239): Xaa can be any naturally occurring amino acid
  misc_feature (241)..(241): Xaa can be any naturally occurring amino acid
  misc_feature (259)..(259): Xaa can be any naturally occurring amino acid
  misc_feature (272)..(273): Xaa can be any naturally occurring amino acid
  misc_feature (278)..(279): Xaa can be any naturally occurring amino acid
  misc_feature (282)..(282): Xaa can be any naturally occurring amino acid
  misc_feature (299)..(301): Xaa can be any naturally occurring amino acid
  misc_feature (303)..(305): Xaa can be any naturally occurring amino acid
  misc_feature (308)..(308): Xaa can be any naturally occurring amino acid
  misc_feature (313)..(313): Xaa can be any naturally occurring amino acid
  misc_feature (317)..(317): Xaa can be any naturally occurring amino acid
  misc_feature (319)..(319): Xaa can be any naturally occurring amino acid
  misc_feature (322)..(322): Xaa can be any naturally occurring amino acid
  misc_feature (330)..(331): Xaa can be any naturally occurring amino acid
  misc_feature (334)..(334): Xaa can be any naturally occurring amino acid
  misc_feature (336)..(336): Xaa can be any naturally occurring amino acid
  misc_feature (340)..(340): Xaa can be any naturally occurring amino acid
  misc_feature (343)..(343): Xaa can be any naturally occurring amino acid
  misc_feature (346)..(346): Xaa can be any naturally occurring amino acid
  misc_feature (349)..(350): Xaa can be any naturally occurring amino acid
  misc_feature (354)..(354): Xaa can be any naturally occurring amino acid
  misc_feature (356)..(356): Xaa can be any naturally occurring amino acid
  misc_feature (360)..(360): Xaa can be any naturally occurring amino acid
  misc_feature (366)..(366): Xaa can be any naturally occurring amino acid
  misc_feature (368)..(370): Xaa can be any naturally occurring amino acid
RVRTAGAEREAGGAEPGGESWAGRAEQGGSAAGTGPEPEPEPHRHLLNRPADRPPQSGPRASGRAQSPPGPSMARAAALLPSRSPPTPLLWPLLLLLLLETGAQDVRVQVLPEVRGQLGGTVELPCHLLPPVPGLYISLVTWQRPDAPANHQNVAAFHPKMGPSFPSPKPGSERLSFVSAKQSTGQDTEAELQDATLALHGLTVEDEGNYTCEFATFPKGSVRGMTWLRVIAKPKNQAXAXKVTFSQDPTTVALCISKXGRPPARISWLSSXXGTKKXXCQXPGRNCHCHQPLHLVPSXXXMXXXPLXVKMKXLKNXLXLGXFFTYPLNXXSGXKXIVLXVCXLNXNSXXPKPXFXWKNXGLSNSXGXXX

SEQ ID NO: 202 - protein, 289 aa, Homo sapiens
  misc_feature (289)..(289): Xaa can be any naturally occurring amino acid
AKEDSKLIALIWPSEWQMIQKLFVVDHVIKITRIEVGDVNPSETQYISEPKLCPECREGLLCQQQRDLREYTQATIYVHKVVDNKKVMKDSAPELNVSSSETEEDKEEAKPDGEKDPDFNQSNGGTKRQKISHQNYIAYQKQVIRRSMRHRKVRGEKALLVSANQTLKELKIQIMHAFSVAPFDQNLSIDGKILSDDCATLGTLGVIPESVILLKADEPIADYAAMDDVMQVCMPEEGFKGTGLLGHSLNTCLLRNDQRGRGVHVRALKQRWINPLHAPSKGRIHSTLX

SEQ ID NO: 203 - protein, 375 aa, Homo sapiens
  misc_feature (240)..(240): Xaa can be any naturally occurring amino acid
  misc_feature (253)..(254): Xaa can be any naturally occurring amino acid
  misc_feature (274)..(274): Xaa can be any naturally occurring amino acid
  misc_feature (278)..(278): Xaa can be any naturally occurring amino acid
  misc_feature (283)..(283): Xaa can be any naturally occurring amino acid
  misc_feature (292)..(292): Xaa can be any naturally occurring amino acid
  misc_feature (298)..(298): Xaa can be any naturally occurring amino acid
  misc_feature (301)..(303): Xaa can be any naturally occurring amino acid
  misc_feature (306)..(306): Xaa can be any naturally occurring amino acid
  misc_feature (308)..(310): Xaa can be any naturally occurring amino acid
  misc_feature (312)..(312): Xaa can be any naturally occurring amino acid
  misc_feature (314)..(315): Xaa can be any naturally occurring amino acid
  misc_feature (320)..(320): Xaa can be any naturally occurring amino acid
  misc_feature (322)..(323): Xaa can be any naturally occurring amino acid
  misc_feature (328)..(329): Xaa can be any naturally occurring amino acid
  misc_feature (338)..(338): Xaa can be any naturally occurring amino acid
  misc_feature (343)..(343): Xaa can be any naturally occurring amino acid
  misc_feature (346)..(346): Xaa can be any naturally occurring amino acid
  misc_feature (348)..(348): Xaa can be any naturally occurring amino acid
  misc_feature (352)..(352): Xaa can be any naturally occurring amino acid
  misc_feature (356)..(356): Xaa can be any naturally occurring amino acid
  misc_feature (358)..(358): Xaa can be any naturally occurring amino acid
  misc_feature (365)..(365): Xaa can be any naturally occurring amino acid
  misc_feature (367)..(367): Xaa can be any naturally occurring amino acid
  misc_feature (373)..(373): Xaa can be any naturally occurring amino acid
  misc_feature (375)..(375): Xaa can be any naturally occurring amino acid
AMSLKLQASNVTNKNDPKSINSRVFIGNLNTALVKKSDVETIFSKYGRVAGCSVHKGYAFVQYSNERHARAAVLGENGRVLAGQTLDINMAGEPKPDRPKGLKRAASAIYSGYIFDYDYYRDDFYDRLFDYRGRLSPVPVPRAVPVKRPRVTVPLVRRVKTNVPVKLFARSTAVTTSSAKIKLKSSELQAIKTELTQIKSNIDALLSRLEQIAAEQKANPDGKKKGDGGGAGGGGGGGGXGGGGSGGGGGGGXXRPPAPQENTTSEAGLPQGEXRTRXDGDEXRLLTHSEEXLEHSQXTNXXXGAXAXXXLXGXXATTRXAXXAPGLXXGTNPGCPPXRVPKXTGXRXLLPXESNXGXVLCRGIXGXFFPRTXLX

SEQ ID NO: 204 - protein, 299 aa, Homo sapiens
  misc_feature (299)..(299): Xaa can be any naturally occurring amino acid
GSSEPEEWCPPMPERSHLTEPSSSGGCLVTPSRRETPSPTPSYGQQSTATLTPSPPDPPQPPTDMPHLHQMPRRVPLGPSSPLSVSQPMLGIREARPAGLGAGPAASPHLSPSPAPSTASSAPGRTWQGNGEMTPPLQGPRARFRKKPKALPYRRENSPGDLPPPPLPPPEEEASWALELRAAGSMSSLERERSGERKAVQAVPLAAQRVLHPDEEAWLPYSRPSFLSRGQGTSTCSTAGSNSSRGSSSSRGSRGPGRSRSRSQSRSQSQRARTETPRGTKMTLVGALRISVPRGRGVX

SEQ ID NO: 205 - protein, 354 aa, Homo sapiens
  misc_feature (254)..(254): Xaa can be any naturally occurring amino acid
  misc_feature (257)..(257): Xaa can be any naturally occurring amino acid
  misc_feature (269)..(269): Xaa can be any naturally occurring amino acid
  misc_feature (284)..(285): Xaa can be any naturally occurring amino acid
  misc_feature (297)..(298): Xaa can be any naturally occurring amino acid
  misc_feature (301)..(302): Xaa can be any naturally occurring amino acid
  misc_feature (312)..(314): Xaa can be any naturally occurring amino acid
  misc_feature (318)..(318): Xaa can be any naturally occurring amino acid
  misc_feature (321)..(321): Xaa can be any naturally occurring amino acid
  misc_feature (323)..(323): Xaa can be any naturally occurring amino acid
  misc_feature (325)..(325): Xaa can be any naturally occurring amino acid
  misc_feature (330)..(330): Xaa can be any naturally occurring amino acid
  misc_feature (335)..(336): Xaa can be any naturally occurring amino acid
  misc_feature (339)..(339): Xaa can be any naturally occurring amino acid
  misc_feature (348)..(354): Xaa can be any naturally occurring amino acid
AGYDLKQLFIGSEGTLGIITTVSILCPPKPRAVNVAFLGCPGFAEVLQTFSTCKGMLGEILSAFEFMDAVCMQLVGRHLHLASPVQESPFYILIETSGSNAGHDAEKLGHFLEHALGSGLVTDGTMATDQRKVKMLWALRERITEALSRDGYVYKYDLSLPVERLYDIVTDLRARLGPHAKHVVGYGHLGDGNLHLNVTAEAFSPSLLAALEPHVYEWTAGQQGSVSAEHGVGFRKRDVLGYSKPPGALQLMQXLKXCWTPRASSTPTXAAQPGLTATPAAAKXXGGRRVALGRGCXXGSXXKPARAGNSTXXXTGTXLGXAXQXSAEIXKMGGXXPLXGRGPCTSEXXXXXXX

SEQ ID NO: 206 - protein, 322 aa, Homo sapiens
  misc_feature (288)..(288): Xaa can be any naturally occurring amino acid
  misc_feature (300)..(300): Xaa can be any naturally occurring amino acid
  misc_feature (313)..(313): Xaa can be any naturally occurring amino acid
  misc_feature (321)..(321): Xaa can be any naturally occurring amino acid
AHASDVGTGPSACPLSPRLGLVCSGSWAPNSWSSFFQDRKRRGNLDMEKLYSENEGMASNQGKMENEEQPQDERKPEVTCTLEDKKLENEGKTENKGKTGDEEMLKDKGKPESEGEAKEGKSEREGESEMEGGSEREGKPEIEGKPESEGEPGSETRAAGKRPAEDDVPRKAKRKTNKGLAHYLKEYKEAIHDMNFSNEDMIREFDNMAKVQDEKRKSKQKLGAFLWMQRNLQDPFYPRGPREFRGGCRAPRRDIEDIPYVCPWQAFTRPCALPLRYFTLGIPPVASXLLTYLHAVFSVXMFLCYMEKLLMVXCKLKTHLXT

SEQ ID NO: 207 - protein, 298 aa, Homo sapiens
  misc_feature (193)..(193): Xaa can be any naturally occurring amino acid
  misc_feature (212)..(212): Xaa can be any naturally occurring amino acid
  misc_feature (242)..(242): Xaa can be any naturally occurring amino acid
  misc_feature (261)..(261): Xaa can be any naturally occurring amino acid
  misc_feature (274)..(274): Xaa can be any naturally occurring amino acid
  misc_feature (278)..(280): Xaa can be any naturally occurring amino acid
  misc_feature (282)..(283): Xaa can be any naturally occurring amino acid
  misc_feature (286)..(287): Xaa can be any naturally occurring amino acid
  misc_feature (289)..(289): Xaa can be any naturally occurring amino acid
  misc_feature (291)..(291): Xaa can be any naturally occurring amino acid
  misc_feature (294)..(298): Xaa can be any naturally occurring amino acid
DKMAAARPEAQSRSSPTPESRSQEPLDLVLVPDDCRPGTPPSDLIEIQVVKVTDTTLVPEPPEPGSFHCALCPAAFRLVSELLFHEHGHLAGAEGGGQGGDPSRCHVCGHSCPGPASLRAHYSLHTGERPYRCALCPRAFKALAPLLRHQHRHGVEPGTSRRPPDTAAVAEQRPGVAPERAEVVMAAAAAGAXVGKPFACRFCAKPFRRSSXMRDHERVHTGERPYHCGICGKGFTQSSVLXGHARIHTGEAPVPLHALRXHLQQLLQLPQAPXHPLXXXGXXGWXXLXAXWLXXXXX

SEQ ID NO: 208 - protein, 183 aa, Homo sapiens
MIKLFSLKQQKKEEESAGGTKGSSKKASAAQLRIQKDINELNLPKTCDISFSDPDDLLNFKLVICPDEGFYKSGKFVFSFKVGQGYPHDPPKVKCETMVYHPNIDLEGNVCLNILREDWKPVLTINSIIYGLQYLFLEPNPEDPLNKEAAEVLQNNRRLFEQNVQRSMRGGYIGSTYFERCLK

SEQ ID NO: 209 - protein, 869 aa, Homo sapiens
MADAEPEAGGGSEDGGGGGGPAPPGQSGSVARVAPLGPEQLRQVLEQVTKAQPPPPPPPFVLRDAARRLRDAAQQAALQRGRGTEPPRLPRLLPPQQLEAICVKVTSGETKGQERPMLLPTTIQPQTARKSQLPRGNSCLVGLHIASPQLLRVQPLVRTEPQSCFLSDLCQPPAQGFVQRPLPALQVVPAKRVPAPKAPDEQGSMLTPLSASDPLAVTSLSSSSAHPFISNLHTRHTEKLKKSLKVKTRSGRVSRPPKYKAKDYKFIKTEDLADGHNPGHGQLDPEMVLSEKASGSTLRGCTEERTLSLTSLGLSMPADPCEGGARSCLVTESARGGLQNGQSVDVEETLPSEPENGALLRSERYQGPRRRACSETLAESRTAVLQQRRAAQLPGGPAAAGEQRASPSKARLKEFLQQCDREDLVELALPQLAQVVTVYEFLLMKVEKDHLAKPFFPAIYKEFEELHKMVKKMCQDYLSSSGLCSQETLEINNDKVAESLGITEFLRKKEIHPDNLGPKHLSRDMDGEQLEGASSEKREREAAEEGLASVKRPRREALSNDTTESLAANSRGREKPRPLHALAAGFSPPVNVTVSPRSEESHTTTVSGGNGSVFQAGPQLQALANLEARRGSIGAALSSRDVSGLPVYAQSGEPRRLTQAQVAAFPGENALEHSSDQDTWDSLRSPGFCSPLSSGGGAESLPPGGPGHAEAGHLGKVCDFHLNHQQPSPTSVLPTEVAAPPLEKILSVDSVAVDCAYRTVPKPGPQPGPHGSLLTEGCLRSLSGDLNRFPCGMEVHSGQRELESVVAVGEAMAFEISNGSHELLSQGQKQIFIQTSDGLILSPPGTIVSQEEDIVTVTDAEGRACGWAR

SEQ ID NO: 210 - protein, 254 aa, Homo sapiens
  misc_feature (77)..(77): Xaa can be any naturally occurring amino acid
  misc_feature (153)..(153): Xaa can be any naturally occurring amino acid
  misc_feature (207)..(207): Xaa can be any naturally occurring amino acid
  misc_feature (210)..(211): Xaa can be any naturally occurring amino acid
  misc_feature (230)..(230): Xaa can be any naturally occurring amino acid
  misc_feature (235)..(235): Xaa can be any naturally occurring amino acid
  misc_feature (238)..(239): Xaa can be any naturally occurring amino acid
  misc_feature (241)..(242): Xaa can be any naturally occurring amino acid
  misc_feature (244)..(248): Xaa can be any naturally occurring amino acid
  misc_feature (250)..(250): Xaa can be any naturally occurring amino acid
  misc_feature (252)..(253): Xaa can be any naturally occurring amino acid
ASPARPGTAHLPASPPVRSPARWGSMAGSPLLWGPRAGGVGLLVLLLLGLFRPPPALCARPVKEPRGLSAASPPLAXTGAPRRFRRSVPRGEAAGAVQELARALAHLLEAERQERARAEAQEAEDQQARVLAQLLRVWGAPRNSDPALGLDDXPDAPAAQLARALLRARLDPAALAAQLVPAPVPAAALRPRPPVYNDGPAGPDAEXAGXXTPDVEPELLKYLLGRILAXNADSXGVXXPXXLXXXXXQXCXXL

SEQ ID NO: 211 - protein, 403 aa, Homo sapiens
  misc_feature (260)..(260): Xaa can be any naturally occurring amino acid
  misc_feature (263)..(263): Xaa can be any naturally occurring amino acid
  misc_feature (274)..(274): Xaa can be any naturally occurring amino acid
  misc_feature (276)..(277): Xaa can be any naturally occurring amino acid
  misc_feature (282)..(282): Xaa can be any naturally occurring amino acid
  misc_feature (285)..(286): Xaa can be any naturally occurring amino acid
  misc_feature (298)..(298): Xaa can be any naturally occurring amino acid
  misc_feature (301)..(302): Xaa can be any naturally occurring amino acid
  misc_feature (316)..(317): Xaa can be any naturally occurring amino acid
  misc_feature (324)..(325): Xaa can be any naturally occurring amino acid
  misc_feature (327)..(327): Xaa can be any naturally occurring amino acid
  misc_feature (332)..(332): Xaa can be any naturally occurring amino acid
  misc_feature (339)..(339): Xaa can be any naturally occurring amino acid
  misc_feature (341)..(341): Xaa can be any naturally occurring amino acid
  misc_feature (344)..(345): Xaa can be any naturally occurring amino acid
  misc_feature (351)..(351): Xaa can be any naturally occurring amino acid
  misc_feature (359)..(359): Xaa can be any naturally occurring amino acid
  misc_feature (363)..(363): Xaa can be any naturally occurring amino acid
  misc_feature (365)..(365): Xaa can be any naturally occurring amino acid
  misc_feature (367)..(367): Xaa can be any naturally occurring amino acid
  misc_feature (369)..(369): Xaa can be any naturally occurring amino acid
  misc_feature (374)..(375): Xaa can be any naturally occurring amino acid
  misc_feature (377)..(377): Xaa can be any naturally occurring amino acid
  misc_feature (379)..(379): Xaa can be any naturally occurring amino acid
  misc_feature (381)..(382): Xaa can be any naturally occurring amino acid
  misc_feature (384)..(384): Xaa can be any naturally occurring amino acid
  misc_feature (387)..(387): Xaa can be any naturally occurring amino acid
  misc_feature (392)..(393): Xaa can be any naturally occurring amino acid
  misc_feature (395)..(395): Xaa can be any naturally occurring amino acid
  misc_feature (398)..(400): Xaa can be any naturally occurring amino acid
  misc_feature (403)..(403): Xaa can be any naturally occurring amino acid
AHASARRDPQERRERGTRVQSSGTWIGAGAMGGEQEEERFDGMLLAMAQQHEGGVQELVNTFFSFLRRKTDFFIGGEEGMAEKLITQTFSHHNQLAQKTRREKRARQEAERREKAERAARLAKEAKSETSGPQIKELTDEEAERLQLEIDQKKDAENHEAQLKNGSLDSPGKQDTEEDEEEDEKDKGKLKPNLGNGADLPNYRWTQTLSELDLAVPFCVNFRLKGKDMVVDIQRRHLRVGLKGQPAIIDGELYNEVKVEXSSXLIEDGKVVTVXLXXIIKWXGGXXWCPVTLKSTPKXLPXXISKLFKPEQNSHPXXKNDVPPXXFXGAFHXPTKPKKXEXLKXXLDSPSXMNFSQGIXLTPXFXPXEXLGVNXXPXFXPXXLXIWXPGFGXXGXAPXXXPGX

SEQ ID NO: 212 - protein, 266 aa, Homo sapiens
  misc_feature (254)..(254): Xaa can be any naturally occurring amino acid
  misc_feature (262)..(263): Xaa can be any naturally occurring amino acid
AHASAHASVRVEAHPENNRPIIQIPSTEGEGSGSWKWKAPEKGSLRQTYELNDLNRDSESCESLKDSFGSGDRKRSNIDSNEHHHHGITTIRVTPVEGSEIGSETLSISSSRDSTLRRKGNIILIPERSNSPENTRNIFYKGTSPTRAYKDVMSIPSLGLLAKDHMLILPVFCSSELGSLTKLDCLPSAQNSVTFQNCYTQTCRSHIKEREKHNARTLTYEEFSDLSSNLKGFAEGSIKRKWFSSNVYYFTSMXQLLGDFSXXAGG

SEQ ID NO: 213 - protein, 440 aa, Homo sapiens
  misc_feature (440)..(440): Xaa can be any naturally occurring amino acid
TLPKDELKELKQKVTSKIDYGNKILELDLIVRDEDGNILDPDNTSVISLFHAHEEATDKITERIKEEMSKDQPDYAMYSRISSSPTHSLYVFVRNFVCRIGEDAELFMSLYDPNKQTVISENYLVRWGSRGFPKEIEMLNNLKVVFTDLGNKDLNRDKIYLICQIVRVGKMDLKDTGAKKCTQGLRRPFGVAVMDITDIIKGKAESDEEKQHFIPFHPVTAENDFLHSLLGKVIASKGDSGGQGLWVTMKMLAGDIIQIRKDYPHLVDRTTAMGQKAGIPRDHHARGCPERHSHYSPTRGFEKSTKNPPRNVEAFLGGGPKDGKNLSKANCRETGKTPRLPPLSEQPQNSPLEGTYTGVSHTKTIPTPTGSHIIPLHHIKRTNNYSLSPPYTMTHTTQRHCPSPPTPRHFTPQPCLQPSHPHTTPQTPSHHHHTTLLITX

SEQ ID NO: 214 - protein, 178 aa, Homo sapiens
ATTSPWMFPSRMAWPEDHVFISTPSFNYTGRDFQRFFADLHFEEGWYMWLQSRDLLAGLPAPGVEVYCLYGVGLPTPRTYIYDHGFPYTDPVGVLYEDGDDTVATRSTELCGLWQGRQPQPVHLLPLHGIQHLNMVFSNLTLEHINAILLGAYRQGPPASPTASPEPPPPERPSFATV

SEQ ID NO: 215 - protein, 440 aa, Homo sapiens
  misc_feature (275)..(275): Xaa can be any naturally occurring amino acid
  misc_feature (282)..(282): Xaa can be any naturally occurring amino acid
  misc_feature (284)..(284): Xaa can be any naturally occurring amino acid
  misc_feature (296)..(296): Xaa can be any naturally occurring amino acid
  misc_feature (440)..(440): Xaa can be any naturally occurring amino acid
GNSLYESYYKQVDPAYTGRVGASEAALFLKKSGLSDIILGKIWDLADPEGKGFLDKQGFYVALRLVACAQSGHEVTLSNLNLSMPPPKFHDTSSPLMVTPPSAEAHWAVRVEEKAKFDGIFESLLPINGLLSGDKVKPVLMNSKLPLDVLGRVWDLSDIDKDGHLDRDEFAVAMHLVYRALEKEPVPSALPPSLIPPSKRKKTVFPGAVPVLPASPPPKDSLRSTPSHGSVSSLNSTGSLSPKHSLKQTQPTVKLGGARGRQDAIDIPEDRPGPXWLREWPXRXGDLHALGPHPNXSSTHMGPGRYEQNRGSAKTNSRLCISFSRRSVKASTLLSPLARHGPAFRRARRARTVSSPASGDLRAERTISQECPFPKEKSLEKNFQKGEDLPKTRGGEFQMTKPKKNFWGPGPKKCSTPRKDTKRHPQCFTSPKSRKHISLX

SEQ ID NO: 216 - protein, 360 aa, Homo sapiens
  misc_feature (201)..(201): Xaa can be any naturally occurring amino acid
  misc_feature (251)..(251): Xaa can be any naturally occurring amino acid
  misc_feature (255)..(255): Xaa can be any naturally occurring amino acid
  misc_feature (262)..(262): Xaa can be any naturally occurring amino acid
  misc_feature (267)..(267): Xaa can be any naturally occurring amino acid
  misc_feature (269)..(269): Xaa can be any naturally occurring amino acid
  misc_feature (273)..(273): Xaa can be any naturally occurring amino acid
  misc_feature (282)..(282): Xaa can be any naturally occurring amino acid
  misc_feature (286)..(286): Xaa can be any naturally occurring amino acid
  misc_feature (290)..(290): Xaa can be any naturally occurring amino acid
  misc_feature (296)..(300): Xaa can be any naturally occurring amino acid
  misc_feature (304)..(306): Xaa can be any naturally occurring amino acid
  misc_feature (309)..(309): Xaa can be any naturally occurring amino acid
  misc_feature (313)..(315): Xaa can be any naturally occurring amino acid
  misc_feature (317)..(317): Xaa can be any naturally occurring amino acid
  misc_feature (319)..(319): Xaa can be any naturally occurring amino acid
  misc_feature (325)..(325): Xaa can be any naturally occurring amino acid
  misc_feature (331)..(331): Xaa can be any naturally occurring amino acid
  misc_feature (333)..(333): Xaa can be any naturally occurring amino acid
  misc_feature (336)..(336): Xaa can be any naturally occurring amino acid
  misc_feature (341)..(341): Xaa can be any naturally occurring amino acid
  misc_feature (347)..(348): Xaa can be any naturally occurring amino acid
  misc_feature (350)..(350): Xaa can be any naturally occurring amino acid
  misc_feature (353)..(355): Xaa can be any naturally occurring amino acid
  misc_feature (360)..(360): Xaa can be any naturally occurring amino acid
GWNKSSTPDGVPTLCCRNEARQQISISRMWGLKVLLLPVVSFALYPEEILDTHWELWKKTHRKQYNNKVDEISRRLIWEKNLKYISIHNLEASLGVHTYELAMNHLGDMTSEEVVQKMTGLKVPLSHSRSNDTLYIPEWEGRAPDSVDYRKKGYVTPVKNQGQCGSCWAFSSVGALEGQLKKKTGKLLNLSPQNLVDCVSXNDGCGGGYMTNAFQYVQKNRGIDSEDAYPYVGQEESCMYNPNRQGKLNAXGTKXIPEGEMXKALKXGXGPNXDLSSWGPFXCKPXSFPXFTGKGXXXXXSCQXXXITXGGFXXXGXGXPKGKQXLGKFKXPXGKXWGKKXNFPWVXXKXNPXXXPTWPX

SEQ ID NO: 217 - protein, 505 aa, Homo sapiens
  misc_feature (505)..(505): Xaa can be any naturally occurring amino acid
AASRSAGEAGPGGSQGRVVRMKGRGGRGPRRGPAGGGEKALKRLKLAVEEFVHATSEGEAPGGCEGRGAPVSFRPGGRTSRKELRKDNRPLRKARRHADDAAPPHNLPPQIPSLLLSHIPLTFPPPPQPTLHTLHTPICHPPSPYHSPPLPPPPNPLPPPSTSHTPPILLNPPLYLPLPLPPPLYLPYPSPPHLHYPLPLITHFPLPFLTYNILNHPTLPSLLTPPPSHTPSPRSNPTTIYLSSHPSPFLHYLPTPNPHTPPPTTHLLPTHTHPLPTPSLIHHYLPLSSPPLPLPPISTYPPLLHSPLPITPTLPTPHHPQPLSHTTHHPSHTLTLSTHSPPPHPPPPPLPPILLPSLPPLPHTTPPPSPHSHSPLSHSPTPTLHHHHLSPPSTSPLTSILSQYHSLLLSIFTHHYTLSSSSPHLNIPPLPTNTTSYTHPFIPITHLPYPPPTHPSISNSHHPLLLPHYHTQSTSPHYSHLLIPHITPLLSQPFTTPPHLPSSYX

SEQ ID NO: 218 - protein, 368 aa, Homo sapiens
  misc_feature (285)..(285): Xaa can be any naturally occurring amino acid
  misc_feature (298)..(298): Xaa can be any naturally occurring amino acid
  misc_feature (300)..(301): Xaa can be any naturally occurring amino acid
  misc_feature (303)..(303): Xaa can be any naturally occurring amino acid
  misc_feature (305)..(306): Xaa can be any naturally occurring amino acid
  misc_feature (311)..(311): Xaa can be any naturally occurring amino acid
  misc_feature (314)..(314): Xaa can be any naturally occurring amino acid
  misc_feature (320)..(320): Xaa can be any naturally occurring amino acid
  misc_feature (323)..(323): Xaa can be any naturally occurring amino acid
  misc_feature (325)..(325): Xaa can be any naturally occurring amino acid
  misc_feature (328)..(328): Xaa can be any naturally occurring amino acid
  misc_feature (331)..(331): Xaa can be any naturally occurring amino acid
  misc_feature (335)..(335): Xaa can be any naturally occurring amino acid
  misc_feature (337)..(338): Xaa can be any naturally occurring amino acid
  misc_feature (342)..(342): Xaa can be any naturally occurring amino acid
  misc_feature (344)..(346): Xaa can be any naturally occurring amino acid
  misc_feature (348)..(348): Xaa can be any naturally occurring amino acid
  misc_feature (350)..(350): Xaa can be any naturally occurring amino acid
  misc_feature (352)..(353): Xaa can be any naturally occurring amino acid
  misc_feature (357)..(357): Xaa can be any naturally occurring amino acid
  misc_feature (359)..(360): Xaa can be any naturally occurring amino acid
  misc_feature (366)..(367): Xaa can be any naturally occurring amino acid
GSFLRPPAFCAPRGGAVPSLGEGERRLSKCGRPPSAHRALGTRCTYPEQGKLWLSRGSECLGEGCGRPTGCHALEQRPERLWNNGRCGAEFWEVISDEHGIDPTGTYHGDSDLQLDRISVYYNEATGGKYVPRAILVDLEPGTMDSVRSGPFGQIFRPDNFVFGQSGAGNNWAKGHYTEGAELVDSVLDVVRKEAESCDCLQGFQLTHSLGGGTGSGMGTLLISKIREEYPDRIMNTFSVVPSPKVSDTVVEPYNATPLRPSVGKEYKPIALTTRPSMKSASALXLTTPTYGDLKPPXLXXHXWXXHLPRXPGXSMLTSXSWXSXGPXPRXLFFXLXXPLPXPXXXQXQXSXXEIPXRXXFQKNKXXT

SEQ ID NO: 219 - protein, 355 aa, Homo sapiens
  misc_feature (240)..(240): Xaa can be any naturally occurring amino acid
  misc_feature (264)..(264): Xaa can be any naturally occurring amino acid
  misc_feature (274)..(274): Xaa can be any naturally occurring amino acid
  misc_feature (277)..(277): Xaa can be any naturally occurring amino acid
  misc_feature (281)..(281): Xaa can be any naturally occurring amino acid
  misc_feature (296)..(296): Xaa can be any naturally occurring amino acid
  misc_feature (300)..(300): Xaa can be any naturally occurring amino acid
  misc_feature (305)..(308): Xaa can be any naturally occurring amino acid
  misc_feature (310)..(310): Xaa can be any naturally occurring amino acid
  misc_feature (312)..(312): Xaa can be any naturally occurring amino acid
  misc_feature (316)..(317): Xaa can be any naturally occurring amino acid
  misc_feature (319)..(319): Xaa can be any naturally occurring amino acid
  misc_feature (322)..(322): Xaa can be any naturally occurring amino acid
  misc_feature (324)..(324): Xaa can be any naturally occurring amino acid
  misc_feature (328)..(328): Xaa can be any naturally occurring amino acid
  misc_feature (338)..(338): Xaa can be any naturally occurring amino acid
  misc_feature (341)..(341): Xaa can be any naturally occurring amino acid
  misc_feature (345)..(345): Xaa can be any naturally occurring amino acid
  misc_feature (349)..(350): Xaa can be any naturally occurring amino acid
  misc_feature (352)..(355): Xaa can be any naturally occurring amino acid
AASSSSSSAGGVSGSSVTGSGFSVSDLAPPRKALFTYPKGAGEMLEDGSERFLCESVFSYQVASTLKQVKHDQQVARMEKLAGLVEELEADEWRFKPIEQLLGFTPSSGYCLDGHLWCAASAKPVGDFLTAYIAIQRSTATSLNCCTFVLGFSVSIHRQQILICVIFQGMFCLFVFKSIGNQIKTISFREPGGLGLRDTQKFSQAKGIYQIWPTEWRLSCHPYGAWKYLPSQGQGQHLWXKNIAFPKKVILQMNVFSTQDLSKXIFKNSFFFSXFLXINSXKFTFFTSKTCPKCWXKKKXLFGKXXXXLXKXKPVXXKXLFXTXKIPXFFPIGGTQPXSVXKKIXLKKXXKXXXX

SEQ ID NO: 220 - protein, 362 aa, Homo sapiens
  misc_feature (256)..(256): Xaa can be any naturally occurring amino acid
  misc_feature (271)..(271): Xaa can be any naturally occurring amino acid
  misc_feature (278)..(278): Xaa can be any naturally occurring amino acid
  misc_feature (301)..(301): Xaa can be any naturally occurring amino acid
  misc_feature (309)..(309): Xaa can be any naturally occurring amino acid
  misc_feature (312)..(312): Xaa can be any naturally occurring amino acid
  misc_feature (314)..(314): Xaa can be any naturally occurring amino acid
  misc_feature (318)..(318): Xaa can be any naturally occurring amino acid
  misc_feature (320)..(320): Xaa can be any naturally occurring amino acid
  misc_feature (331)..(331): Xaa can be any naturally occurring amino acid
  misc_feature (333)..(333): Xaa can be any naturally occurring amino acid
  misc_feature (339)..(339): Xaa can be any naturally occurring amino acid
  misc_feature (350)..(350): Xaa can be any naturally occurring amino acid
  misc_feature (352)..(352): Xaa can be any naturally occurring amino acid
  misc_feature (355)..(355): Xaa can be any naturally occurring amino acid
  misc_feature (357)..(357): Xaa can be any naturally occurring amino acid
  misc_feature (360)..(362): Xaa can be any naturally occurring amino acid
ECMCKHNTAGSHCQHCAPLYNDRPWEAADGKTGAPNECRTCKCNGHADTCHFDVNVWEASGNRSGGVCDDCQHNTEGQYCQRCKPGFYRDLRRPFSAPDACKPCSCHPVGSAVLPANSVTFCDPSNGDCPCKPGVAGRRCDRCMVGYWGFGDYGCRPCDCAGSCDPITGDCISSHTDIDWYHEVPDFRPVHNKSEPAWEWEDAQGFSALLHSGKCECKEQTLGNAKAFCGMKYSYVLKIKILSAHDKGTHVEVNVXIKKVLKSTKLKIFRXKANIISXIMDGQRMPLFQSSILGLEKPCTXTRNLKTGXTNXKXKKLXSXHWKPFSFGKKXFXGKFLKXKRASYPLKMGXPXNGXFXLFXXX

SEQ ID NO: 221 - protein, 108 aa, Homo sapiens
ATYAHENMPLAKDLLHPSPEEEKRKHKKKRLVQSPNSYFMDVKCPGCYKITTVFSHAQTVVLCVGCSTVLCQPTGGKARLTEGCSFRRKQHKHSESRVGNHLNKHILD

SEQ ID NO: 222 - protein, 232 aa, Homo sapiens
  misc_feature (188)..(188): Xaa can be any naturally occurring amino acid
  misc_feature (205)..(206): Xaa can be any naturally occurring amino acid
  misc_feature (213)..(213): Xaa can be any naturally occurring amino acid
  misc_feature (219)..(219): Xaa can be any naturally occurring amino acid
  misc_feature (221)..(221): Xaa can be any naturally occurring amino acid
  misc_feature (223)..(224): Xaa can be any naturally occurring amino acid
  misc_feature (227)..(227): Xaa can be any naturally occurring amino acid
  misc_feature (230)..(232): Xaa can be any naturally occurring amino acid
DAGRFHSTKKGNFHEIFNLTENERPLAVCENGWRCCLINRDRKMPTDYIRNGVLYVTENYLCFESSKSGSSKRNKVIKLVDITDIQKYKVLSVLPGSGMGIAVSTPSTQKPLVFGAMVHRDEAFETILSQYIKITSAAASGGDSYLAQDVAGIFFFFFFFFFFFLRFGSGNNWTSSAFAIILPGPVGXYWVDLCVLSTKKGPGSXXGKGGGPXLPQGTXRXLXXPPXKIXXX

SEQ ID NO: 223 - protein, 300 aa, Homo sapiens
  misc_feature (279)..(279): Xaa can be any naturally occurring amino acid
  misc_feature (281)..(281): Xaa can be any naturally occurring amino acid
  misc_feature (292)..(300): Xaa can be any naturally occurring amino acid
AHFRPFGSLTSTMAVGKNKRLTKGGKKGAKKKVVDPFSKKDWYDVKAPAMFNIRNIGKTLVTRTQGTKIASDGLKGRVFEVSLADLQNDEVAFRKFKLITEDVQGKNCLTNFHGMDLTRDKMCSMVKKWQTMIEAHVDVKTTDGYLLRLFCVGFTKKRNNQIRKTSYAQHQQVRQIRKKMMEIMTREVQTNDLKEVVNKLIPDSIGKDIEKACQSIYPLHDVFVRKVKMLKKPKFELGKLMELHGEGSSSGKATGGRDRCKLNRADGYEPPVQKSVSSXFXSGKKVLFVKKXXXXXXXXX

SEQ ID NO: 224 - protein, 313 aa, Homo sapiens
  misc_feature (226)..(226): Xaa can be any naturally occurring amino acid
  misc_feature (244)..(244): Xaa can be any naturally occurring amino acid
  misc_feature (247)..(248): Xaa can be any naturally occurring amino acid
  misc_feature (251)..(251): Xaa can be any naturally occurring amino acid
  misc_feature (254)..(254): Xaa can be any naturally occurring amino acid
  misc_feature (260)..(260): Xaa can be any naturally occurring amino acid
  misc_feature (265)..(265): Xaa can be any naturally occurring amino acid
  misc_feature (281)..(281): Xaa can be any naturally occurring amino acid
  misc_feature (283)..(283): Xaa can be any naturally occurring amino acid
  misc_feature (290)..(290): Xaa can be any naturally occurring amino acid
  misc_feature (292)..(292): Xaa can be any naturally occurring amino acid
  misc_feature (295)..(296): Xaa can be any naturally occurring amino acid
  misc_feature (298)..(298): Xaa can be any naturally occurring amino acid
  misc_feature (306)..(306): Xaa can be any naturally occurring amino acid
  misc_feature (311)..(311): Xaa can be any naturally occurring amino acid
AGLLAGEGVCQLLRHSSPGRCLLKSRARGSVIMSRYGRYGGETKVYVGNLGTGAGKGELERAFSYYGPLRTVWIARNPPGFAFVEFEDPRDAEDAVRGLDGKVICGSRVRVELSTGMPRRSRFDRPPARRPFDPNDRCYECGEKGHYAYDCHRYSRRRRSRYLFRNGWYSSSSNSFISKAETSVFLTMLIVQVYFTIFVLKKCYYINNQPGQNLSGFFVVSRLDSXCHEPYDIMLRRPCKSDNXPPXXLRXSAXARSPSXHLHLXSPLFFRGKKFKRGIPXNXKNLALQXGXPPXXFXKKETPKLXPLSPXKK

SEQ ID NO: 225 - protein, 253 aa, Homo sapiens
  misc_feature (195)..(195): Xaa can be any naturally occurring amino acid
  misc_feature (199)..(199): Xaa can be any naturally occurring amino acid
  misc_feature (220)..(220): Xaa can be any naturally occurring amino acid
  misc_feature (224)..(224): Xaa can be any naturally occurring amino acid
  misc_feature (227)..(227): Xaa can be any naturally occurring amino acid
  misc_feature (229)..(229): Xaa can be any naturally occurring amino acid
  misc_feature (242)..(242): Xaa can be any naturally occurring amino acid
  misc_feature (247)..(247): Xaa can be any naturally occurring amino acid
ADAWEITLYPDKHGCVRDLLEECKKAVELGEKASGKLRLLEIVSYKIIGVHQEDELLECLSPATSRTFRIEEIPLDQVDIDKENEMLVTVAHFHKEVFGTFGIPFLLRIHQGEHFREVMKRIQSLLDIQEKEFEKFKFAIVMMGPTPVHKRRVSKFERLATARYVSSSALARARPLQQSPKEESLHLPLEKAIKXHNFXSWCVQGQGRCVVAPLKPKTLXHGPXNRXLXRDSLVGFFLLGWXIGFLXFGRPFW

SEQ ID NO: 226 - protein, 355 aa, Homo sapiens
  misc_feature (265)..(265): Xaa can be any naturally occurring amino acid
  misc_feature (270)..(270): Xaa can be any naturally occurring amino acid
  misc_feature (280)..(281): Xaa can be any naturally occurring amino acid
  misc_feature (288)..(288): Xaa can be any naturally occurring amino acid
  misc_feature (296)..(297): Xaa can be any naturally occurring amino acid
  misc_feature (302)..(303): Xaa can be any naturally occurring amino acid
  misc_feature (310)..(310): Xaa can be any naturally occurring amino acid
  misc_feature (315)..(315): Xaa can be any naturally occurring amino acid
  misc_feature (318)..(318): Xaa can be any naturally occurring amino acid
  misc_feature (331)..(331): Xaa can be any naturally occurring amino acid
  misc_feature (334)..(334): Xaa can be any naturally occurring amino acid
  misc_feature (337)..(338): Xaa can be any naturally occurring amino acid
  misc_feature (342)..(342): Xaa can be any naturally occurring amino acid
  misc_feature (345)..(345): Xaa can be any naturally occurring amino acid
  misc_feature (351)..(353): Xaa can be any naturally occurring amino acid
  misc_feature (355)..(355): Xaa can be any naturally occurring amino acid
ASPSLLSPSPLPPRPRSSTMSAPAAKVSKKELNSNHDGADETSEKEQQEAIEHIDEVQNEIDRLNEQASEEILKVEQKYNKLRQPFFQKRSELIAKIPNFWVTTFVNHPQVSALLGEEDEEALHYLTRVEVTEFEDIKSGYRIDFYFDENPYFENKVLSKEFHLNESGDPSSKSTEIKWKSGKDLTKRSSQTQNKASRKRQHEEPESFFTWFTDHSDAGADELGEVIKDDIWPNPLQYYLVPDMDDEEGEGEEDDDDDEEEEGLXDIDEXGDEDEGEEDXXNDEGEEXKGGRKKLXXTLMDXXLPFFNFXQSLGXSCXLFFFFFFFPPGAXPPXLEXXFPTXGPXFLGENXXXKX

SEQ ID NO: 227 - protein, 258 aa, Homo sapiens
  misc_feature (258)..(258): Xaa can be any naturally occurring amino acid
GSVVAMAGLTDLQRLQARVEELERWVYGPGGARGSRKVADGLVKVQVALGNISSKRERVKILYKKIEDLIKYLDPEYIDRIAIPDASKLQFILAEEQFILSQVALLEQVNALVPMLDSAHIKAVPEHAARLQRLAQIHIQQQDQCVEITEESKALLEEYNKTTMLLSKQFVQWDELLCQLEAATQVKPAEELLPIPKWAWAVRLQGPMPTCLCYKAEEALYLLASRPTSLYSGLSWRSGYLRFAICNTHPPPNQCSYX

SEQ ID NO: 228 - protein, 330 aa, Homo sapiens
  misc_feature (256)..(256): Xaa can be any naturally occurring amino acid
  misc_feature (264)..(264): Xaa can be any naturally occurring amino acid
  misc_feature (273)..(273): Xaa can be any naturally occurring amino acid
  misc_feature (290)..(290): Xaa can be any naturally occurring amino acid
  misc_feature (295)..(295): Xaa can be any naturally occurring amino acid
  misc_feature (300)..(300): Xaa can be any naturally occurring amino acid
  misc_feature (308)..(309): Xaa can be any naturally occurring amino acid
  misc_feature (312)..(312): Xaa can be any naturally occurring amino acid
  misc_feature (321)..(321): Xaa can be any naturally occurring amino acid
  misc_feature (324)..(324): Xaa can be any naturally occurring amino acid
  misc_feature (329)..(330): Xaa can be any naturally occurring amino acid
GAIVEAARLEKVHSLFRRQLAIPLYDMEATFAEYEEWSEDPIPESVIQNYNKALQQLEKYKPYEEALLQAEAPRLAEYQAYIDFEMKIGDPARIQLIFERALVENCLVPDLWIRYITFEKALNAGFIQATDYVEIWQAYLDYLRRRVDFKQDSSKELEELRAAFTRALEYLKQEVEERFNESGDPSCVIMQNWARIEARLCNNMQKARELWDSIMTRGNAKYANMWLEYYNLEKSSWHPALPEGSAPGRPVHQLPXARLRSVTXHGEDRRFFXNWEYSCSKKLKPRINLXSMNKXMKGCXKKKPPPLXXKKXKRLNQRKKXLGXEKKKXX

SEQ ID NO: 229 - protein, 253 aa, Homo sapiens
  misc_feature (179)..(179): Xaa can be any naturally occurring amino acid
  misc_feature (193)..(193): Xaa can be any naturally occurring amino acid
  misc_feature (207)..(207): Xaa can be any naturally occurring amino acid
  misc_feature (215)..(215): Xaa can be any naturally occurring amino acid
  misc_feature (226)..(226): Xaa can be any naturally occurring amino acid
  misc_feature (228)..(228): Xaa can be any naturally occurring amino acid
  misc_feature (236)..(237): Xaa can be any naturally occurring amino acid
  misc_feature (240)..(240): Xaa can be any naturally occurring amino acid
  misc_feature (244)..(244): Xaa can be any naturally occurring amino acid
  misc_feature (247)..(247): Xaa can be any naturally occurring amino acid
  misc_feature (249)..(250): Xaa can be any naturally occurring amino acid
  misc_feature (252)..(253): Xaa can be any naturally occurring amino acid
AKMAGWQSYVDNLMCDGCCQEAAIVGYCDAKYVWAATAGGVFQSITPIEIDMIVGKDREGFFTNGLTLGAKKCSVIRDSLYVDGDCTMDIRTKSQGGEPTYNVAVGRAGRVLVFVMGKEGVHGGGLNKKAYSMAKYLRDSGFLLGRLLSIRGKLLLNFPSYKLKSFWKFYQCRVMGYEXCVSFVSLWWGGKGXFLSALPPQNNSGPXLVLVPLGXPSNWVIAMGKXKXVHGRPPLXXKSXTPFXYLXEXXLXX

SEQ ID NO: 230 - protein, 315 aa, Homo sapiens
  misc_feature (235)..(235): Xaa can be any naturally occurring amino acid
  misc_feature (245)..(245): Xaa can be any naturally occurring amino acid
  misc_feature (250)..(250): Xaa can be any naturally occurring amino acid
  misc_feature (261)..(261): Xaa can be any naturally occurring amino acid
  misc_feature (264)..(264): Xaa can be any naturally occurring amino acid
  misc_feature (267)..(267): Xaa can be any naturally occurring amino acid
  misc_feature (273)..(273): Xaa can be any naturally occurring amino acid
  misc_feature (279)..(279): Xaa can be any naturally occurring amino acid
  misc_feature (287)..(287): Xaa can be any naturally occurring amino acid
  misc_feature (292)..(292): Xaa can be any naturally occurring amino acid
  misc_feature (294)..(295): Xaa can be any naturally occurring amino acid
  misc_feature (297)..(297): Xaa can be any naturally occurring amino acid
  misc_feature (299)..(299): Xaa can be any naturally occurring amino acid
  misc_feature (301)..(303): Xaa can be any naturally occurring amino acid
  misc_feature (306)..(307): Xaa can be any naturally occurring amino acid
  misc_feature (311)..(312): Xaa can be any naturally occurring amino acid
  misc_feature (314)..(315): Xaa can be any naturally occurring amino acid
GGRSQLSAHGPASFKMSTVHEILCKLSLEGDHSTPPSAYGSVKAYTNFDAERDALNIETAIKTKGVDEVTIVNILTNRSNAQRQDIAFAYQRRTKKELASALKSALSGHLETVILGLLKTPAQYDASELKASMKGLGTDEDSLIEIICSRTNQELQEINRVYKEMYKTDLEKDIISDTSGDFRKLMVALAKGRRAEDGSVIDYELIDQDARDLYDAGVKRKGTDVPQVDQHHDRXERAPPPESIXIGTKXQPLYDIVWKSXRKXVRXTWKNGXSTLGSXAFKNKAPXEFLLXRXXRXPXKXXXGNXXKKGXXSXX

SEQ ID NO: 231 - protein, 270 aa, Homo sapiens
AHASAHASGSLLRNEVTDSGIVGPQPIDFVPNALRHAVDGRQEEIPVVIAASEDRLGGAIAAINSIQHNTRSNVIFYIVTLNNTADHLRSWLNSDSLKSIRYKIVNFDPKLLEGKVKEDPDQGESMKPLTFARFYLPILVPSAKKAIYMDDDVIVQGDILALYNTALKPGHAAAFSEDCDSASTKVVIRGAGNQYNYIGYLDYKKERIRKLSMKASTCSFNPGVFVANLTEWKRQNITNQLEKWMKLNVEEGLYSRTLAGSITTPPLLIV

SEQ ID NO: 232 - protein, 450 aa, Homo sapiens
  misc_feature (441)..(441): Xaa can be any naturally occurring amino acid
  misc_feature (450)..(450): Xaa can be any naturally occurring amino acid
VWKTSEDLLSYEALPMALETICRPSGRKSSKMQAFRIWDVNQKTFYLRNNQLVAGYLQGPNVNLEEKIDVVPIEPHALFLGIHGGKMCLSCVKSGDETRLQLEAVNITDLSENRKQDKRFAFIRSDSGPTTSFESAACPGWFLCTAMEADQPVSLTNMPDEGVMVTKFYFQEDEYCPGLPVPILAWQRLPGMPVPLPQGSRLWGHGPPMRGEPPKGVPKNWAKESAPLSIDQPPWWPPKGLLNGGNKRKEAPAKKPFPGPPRILGKKPETPGKKGSPLQGSFLPLSPFPGPGDPNAPLLAPPPRGAPHPVFKKKKTLPPCGGVFPVLATTTNIIPRLSFSLPPPEQASPLSPYTPSRRTQRTPKTSLPPYTQVTDTSHQPPAPTISSQPPHLTHHYHHSSHTLHYPHFSHPPSPMPPTHSPTAYAHHSSTPISSSLPHRHXTLPHPPLRX

SEQ ID NO: 233 - protein, 357 aa, Homo sapiens
  misc_feature (221)..(221): Xaa can be any naturally occurring amino acid
  misc_feature (257)..(257): Xaa can be any naturally occurring amino acid
  misc_feature (282)..(282): Xaa can be any naturally occurring amino acid
  misc_feature (284)..(285): Xaa can be any naturally occurring amino acid
  misc_feature (299)..(299): Xaa can be any naturally occurring amino acid
  misc_feature (308)..(308): Xaa can be any naturally occurring amino acid
  misc_feature (310)..(311): Xaa can be any naturally occurring amino acid
  misc_feature (315)..(315): Xaa can be any naturally occurring amino acid
  misc_feature (318)..(320): Xaa can be any naturally occurring amino acid
  misc_feature (323)..(324): Xaa can be any naturally occurring amino acid
  misc_feature (328)..(329): Xaa can be any naturally occurring amino acid
  misc_feature (338)..(338): Xaa can be any naturally occurring amino acid
  misc_feature (343)..(346): Xaa can be any naturally occurring amino acid
  misc_feature (349)..(350): Xaa can be any naturally occurring amino acid
  misc_feature (353)..(354): Xaa can be any naturally occurring amino acid
  misc_feature (356)..(356): Xaa can be any naturally occurring amino acid
GEPDRRPEREAAVAAMAADGERSPLLSEPIDGGAGGNGLVGPGGSGAGPGGGLTPSAPPYGAAFPPFPEGHPAVLPGEDPPPYSPLTSPDSGSAPMITCRVCQSLINVEGKMHQHVVKCGVCNEATPIKNAPPGKKYVRCPCNCLLICKVTSQRIACPRPYCKRIINLGPVHPGPLSPEPQPMGVRVICGHCKNTFLWTEFTDRTLARCPHCRKVSSIGRXYPRKRCICCFLLGLLLAVTATGLAFGTWKHARRYGXIYAAWAFVILLAVLCLGPGSLLGLXEXXPPCPKILLNLITTXCAWPLPWWXSXXTKEXGVXXXSGXXKRNXXLPSFSWEKXETSPXXXXEGXXKPXXHXF

SEQ ID NO: 234 - protein, 242 aa, Homo sapiens
  misc_feature (5)..(5): Xaa can be any naturally occurring amino acid
  misc_feature (89)..(89): Xaa can be any naturally occurring amino acid
  misc_feature (117)..(118): Xaa can be any naturally occurring amino acid
  misc_feature (133)..(133): Xaa can be any naturally occurring amino acid
  misc_feature (145)..(145): Xaa can be any naturally occurring amino acid
  misc_feature (154)..(154): Xaa can be any naturally occurring amino acid
  misc_feature (156)..(158): Xaa can be any naturally occurring amino acid
  misc_feature (163)..(163): Xaa can be any naturally occurring amino acid
  misc_feature (170)..(170): Xaa can be any naturally occurring amino acid
  misc_feature (172)..(172): Xaa can be any naturally occurring amino acid
  misc_feature (176)..(176): Xaa can be any naturally occurring amino acid
  misc_feature (178)..(178): Xaa can be any naturally occurring amino acid
  misc_feature (186)..(186): Xaa can be any naturally occurring amino acid
  misc_feature (190)..(190): Xaa can be any naturally occurring amino acid
  misc_feature (192)..(192): Xaa can be any naturally occurring amino acid
  misc_feature (194)..(194): Xaa can be any naturally occurring amino acid
  misc_feature (196)..(197): Xaa can be any naturally occurring amino acid
  misc_feature (202)..(202): Xaa can be any naturally occurring amino acid
  misc_feature (205)..(205): Xaa can be any naturally occurring amino acid
  misc_feature (209)..(209): Xaa can be any naturally occurring amino acid
  misc_feature (215)..(215): Xaa can be any naturally occurring amino acid
  misc_feature (217)..(217): Xaa can be any naturally occurring amino acid
  misc_feature (222)..(222): Xaa can be any naturally occurring amino acid
  misc_feature (225)..(225): Xaa can be any naturally occurring amino acid
  misc_feature (227)..(227): Xaa can be any naturally occurring amino acid
  misc_feature (238)..(238): Xaa can be any naturally occurring amino acid
  misc_feature (240)..(242): Xaa can be any naturally occurring amino acid
AHASXRFWCPECGKGFRRRAHLRQHGVTHSGARPFQCVRCQREFKRLADLARHAQVHAGGPAPHPCPRCPRRFSRAYSLLRHQRCHRAXLERAAALQALQAQAPTSPPPPPPPLKAXXEEEGLPLPLANIKEXPPSPGTPPQSPXAPPVFLSAXCXXXQDHSXFEMDEEXVXSKAXLXGLGGLASXSPPXSXPXRXXLPGLXNVXGNLXEPPPLXYXTFPLXTLXNXMGGPWNSLFLXNXXX

SEQ ID NO: 235 - protein, 376 aa, Homo sapiens
  misc_feature (257)..(257): Xaa can be any naturally occurring amino acid
  misc_feature (265)..(266): Xaa can be any naturally occurring amino acid
  misc_feature (269)..(269): Xaa can be any naturally occurring amino acid
  misc_feature (276)..(277): Xaa can be any naturally occurring amino acid
  misc_feature (288)..(288): Xaa can be any naturally occurring amino acid
  misc_feature (292)..(292): Xaa can be any naturally occurring amino acid
  misc_feature (297)..(297): Xaa can be any naturally occurring amino acid
  misc_feature (299)..(300): Xaa can be any naturally occurring amino acid
  misc_feature (302)..(302): Xaa can be any naturally occurring amino acid
  misc_feature (307)..(307): Xaa can be any naturally occurring amino acid
  misc_feature (311)..(311): Xaa can be any naturally occurring amino acid
  misc_feature (316)..(316): Xaa can be any naturally occurring amino acid
  misc_feature (318)..(318): Xaa can be any naturally occurring amino acid
  misc_feature (321)..(322): Xaa can be any naturally occurring amino acid
  misc_feature (324)..(324): Xaa can be any naturally occurring amino acid
  misc_feature (328)..(328): Xaa can be any naturally occurring amino acid
  misc_feature (331)..(331): Xaa can be any naturally occurring amino acid
  misc_feature (333)..(333): Xaa can be any naturally occurring amino acid
  misc_feature (336)..(336): Xaa can be any naturally occurring amino acid
  misc_feature (339)..(340): Xaa can be any naturally occurring amino acid
  misc_feature (342)..(343): Xaa can be any naturally occurring amino acid
  misc_feature (345)..(345): Xaa can be any naturally occurring amino acid
  misc_feature (347)..(348): Xaa can be any naturally occurring amino acid
  misc_feature (350)..(350): Xaa can be any naturally occurring amino acid
  misc_feature (352)..(352): Xaa can be any naturally occurring amino acid
  misc_feature (354)..(356): Xaa can be any naturally occurring amino acid
  misc_feature (360)..(360): Xaa can be any naturally occurring amino acid
  misc_feature (362)..(362): Xaa can be any naturally occurring amino acid
  misc_feature (365)..(365): Xaa can be any naturally occurring amino acid
  misc_feature (372)..(372): Xaa can be any naturally occurring amino acid
  misc_feature (374)..(374): Xaa can be any naturally occurring amino acid
  misc_feature (376)..(376): Xaa can be any naturally occurring amino acid
GGKLSPFLPPEIFQKLQGAESQSCKKELTPLEEASLQNQKLKAAYEARMARLDPSQAMQKTSLTLSLQRQMMENLVIAKAREETLQRKMEERRLRLQEAANRRFCSQVALTPEEREQRALYAAILEYEQDHDWPKHWKAKLKRNPGDLSLVTSLVSHLLSLPDHPIAQLLRRLQCSVYSALYPAVSRAAAPAPGCCPPTPNPGSRRLRPSQSLHCMLSPPEPSAAPRPQDSPPTPPLQPGPVGSPSPLGDTASGLPXKDSSFEDXXQFXGTSERQXXAVGYSRNPTAXPENXVEEIXMXXKXVALAXLLAXKGLKXVXFKXXLXGLAXRNXFXPRXALXXGXXRXVXXPXKXSXXXLDFXGXPPXLWFPQVXPXTX

SEQ ID NO: 236 - protein, 359 aa, Homo sapiens
  misc_feature (268)..(268): Xaa can be any naturally occurring amino acid
  misc_feature (275)..(275): Xaa can be any naturally occurring amino acid
  misc_feature (277)..(278): Xaa can be any naturally occurring amino acid
  misc_feature (281)..(281): Xaa can be any naturally occurring amino acid
  misc_feature (285)..(285): Xaa can be any naturally occurring amino acid
  misc_feature (301)..(301): Xaa can be any naturally occurring amino acid
  misc_feature (303)..(303): Xaa can be any naturally occurring amino acid
  misc_feature (305)..(305): Xaa can be any naturally occurring amino acid
  misc_feature (308)..(309): Xaa can be any naturally occurring amino acid
  misc_feature (313)..(313): Xaa can be any naturally occurring amino acid
  misc_feature (319)..(319): Xaa can be any naturally occurring amino acid
  misc_feature (327)..(327): Xaa can be any naturally occurring amino acid
  misc_feature (330)..(330): Xaa can be any naturally occurring amino acid
  misc_feature (333)..(333): Xaa can be any naturally occurring amino acid
  misc_feature (335)..(335): Xaa can be any naturally occurring amino acid
  misc_feature (340)..(340): Xaa can be any naturally occurring amino acid
  misc_feature (345)..(345): Xaa can be any naturally occurring amino acid
  misc_feature (353)..(354): Xaa can be any naturally occurring amino acid
  misc_feature (357)..(358): Xaa can be any naturally occurring amino acid
AEEIREKLQQVMSRRKEMNEKWEARWERLRMLLEVCQFSRDASVAEAWLIAQEPYLASGDFGHTVDSVEKLIKRHEAFEKSTASWAERFAALEKPTTLELKERQIAERPAEETGPQEEEGETAGEAPVSHHAATERTSPGEEEGTWPQNLQQPPPPGQHKDGQKSTGDERPTTEPLFKVLDTPLSEGDEPATLPAPRDHGQSVQMEGYLGRKHDLEGPNKKASNRSWNNLYCVLRNSELTFYKDAKNLALGMPYHGEEPLALKHAICXIAANYKXKXXVFXLKLXMAASGSSMARMKKKCXPXFXGVXXPINXSQNIPXQGQNLPLXFLXGPXPXLGKKXRKKNXPFPQKNTXXGWXXP

SEQ ID NO: 237 - protein, 314 aa, Homo sapiens
  misc_feature (220)..(220): Xaa can be any naturally occurring amino acid
  misc_feature (247)..(247): Xaa can be any naturally occurring amino acid
  misc_feature (257)..(257): Xaa can be any naturally occurring amino acid
  misc_feature (259)..(259): Xaa can be any naturally occurring amino acid
  misc_feature (261)..(261): Xaa can be any naturally occurring amino acid
  misc_feature (264)..(264): Xaa can be any naturally occurring amino acid
  misc_feature (274)..(274): Xaa can be any naturally occurring amino acid
  misc_feature (277)..(277): Xaa can be any naturally occurring amino acid
  misc_feature (283)..(284): Xaa can be any naturally occurring amino acid
  misc_feature (286)..(287): Xaa can be any naturally occurring amino acid
  misc_feature (291)..(291): Xaa can be any naturally occurring amino acid
  misc_feature (293)..(294): Xaa can be any naturally occurring amino acid
  misc_feature (296)..(296): Xaa can be any naturally occurring amino acid
  misc_feature (299)..(302): Xaa can be any naturally occurring amino acid
  misc_feature (304)..(304): Xaa can be any naturally occurring amino acid
  misc_feature (307)..(307): Xaa can be any naturally occurring amino acid
  misc_feature (311)..(311): Xaa can be any naturally occurring amino acid
  misc_feature (313)..(314): Xaa can be any naturally occurring amino acid
GYIILYNYRHGGRQGQIIYNWQGAQSTQDEVAASAILTAQLDEELGGTPVQSRVVQGKEPAHLMSLFGGKPMIIYKGGTSREGGQTAPASTRLFQVRANSAGATRAVEVLPKAGALNSNDAFVLKTPSAAYLWVGTGASEAEKTGAQELLRVLRAQPVQVAEGSEPDGFWEALGGKAAYRTSPRLKDKKMDAHPPRLFACSNKIGRFVIEEVPGELMQEXLATDDVMLLDTWDQVFVWVGKDSQEEXKTEALTSAKXYXEXGPXQSGIGGTPIXRGXKKGFLXXPXXFGGXGXXWXGKXXXXGXWGXPLWXRXX

SEQ ID NO: 238 - protein, 387 aa, Homo sapiens
  misc_feature (285)..(285): Xaa can be any naturally occurring amino acid
  misc_feature (289)..(289): Xaa can be any naturally occurring amino acid
  misc_feature (291)..(291): Xaa can be any naturally occurring amino acid
  misc_feature (298)..(298): Xaa can be any naturally occurring amino acid
  misc_feature (307)..(307): Xaa can be any naturally occurring amino acid
  misc_feature (309)..(310): Xaa can be any naturally occurring amino acid
  misc_feature (313)..(313): Xaa can be any naturally occurring amino acid
  misc_feature (316)..(317): Xaa can be any naturally occurring amino acid
  misc_feature (320)..(320): Xaa can be any naturally occurring amino acid
  misc_feature (324)..(324): Xaa can be any naturally occurring amino acid
  misc_feature (334)..(334): Xaa can be any naturally occurring amino acid
  misc_feature (344)..(344): Xaa can be any naturally occurring amino acid
  misc_feature (346)..(346): Xaa can be any naturally occurring amino acid
  misc_feature (349)..(349): Xaa can be any naturally occurring amino acid
  misc_feature (351)..(351): Xaa can be any naturally occurring amino acid
  misc_feature (353)..(356): Xaa can be any naturally occurring amino acid
  misc_feature (361)..(361): Xaa can be any naturally occurring amino acid
  misc_feature (368)..(368): Xaa can be any naturally occurring amino acid
  misc_feature (371)..(371): Xaa can be any naturally occurring amino acid
  misc_feature (376)..(376): Xaa can be any naturally occurring amino acid
  misc_feature (379)..(379): Xaa can be any naturally occurring amino acid
  misc_feature (384)..(384): Xaa can be any naturally occurring amino acid
  misc_feature (386)..(387): Xaa can be any naturally occurring amino acid
ADAWARKDKDQRKQQAMWRVPSDLKMLKRLKTQMAEVRCMKTDVKNTLSEIKSSSAASGDMQTSLFSADQAALAACGTENSGRLQDLGMELLAKSSVANCYIRNSTNKKSNSPKPARSSVAGSLSLRRAVDPGENSRSKGDCQTLSEGSPGSSQSGSRHSSPRALIHGSIGDILPKTEDRQCKALDSDAVVVAVFSGLPAVEKRRKMVTLGANAKGGHLEGLQMTDLENNSETGELQPVLPEGASAAPEEGMSSDSDIECDTENEEQEEHTSVGGFPDSFMVMTXPRMXIXIPVFLMXNKALKISPXYXXKKXEGXXQIXKLTXQATLTLNLLXWGPNCLRQKXNXAFXFXSXXXXNLKRXEGALFSXTPXFLGKXLGXFFYGXKXX

SEQ ID NO: 239 - protein, 409 aa, Homo sapiens
  misc_feature (268)..(268): Xaa can be any naturally occurring amino acid
  misc_feature (288)..(288): Xaa can be any naturally occurring amino acid
  misc_feature (303)..(303): Xaa can be any naturally occurring amino acid
  misc_feature (315)..(315): Xaa can be any naturally occurring amino acid
  misc_feature (318)..(318): Xaa can be any naturally occurring amino acid
  misc_feature (325)..(325): Xaa can be any naturally occurring amino acid
  misc_feature (329)..(329): Xaa can be any naturally occurring amino acid
  misc_feature (334)..(334): Xaa can be any naturally occurring amino acid
  misc_feature (337)..(338): Xaa can be any naturally occurring amino acid
  misc_feature (340)..(341): Xaa can be any naturally occurring amino acid
  misc_feature (345)..(346): Xaa can be any naturally occurring amino acid
  misc_feature (349)..(350): Xaa can be any naturally occurring amino acid
  misc_feature (353)..(353): Xaa can be any naturally occurring amino acid
  misc_feature (355)..(355): Xaa can be any naturally occurring amino acid
  misc_feature (357)..(358): Xaa can be any naturally occurring amino acid
  misc_feature (362)..(363): Xaa can be any naturally occurring amino acid
  misc_feature (366)..(366): Xaa can be any naturally occurring amino acid
  misc_feature (370)..(370): Xaa can be any naturally occurring amino acid
  misc_feature (372)..(372): Xaa can be any naturally occurring amino acid
  misc_feature (376)..(378): Xaa can be any naturally occurring amino acid
  misc_feature (380)..(380): Xaa can be any naturally occurring amino acid
  misc_feature (386)..(387): Xaa can be any naturally occurring amino acid
  misc_feature (393)..(393): Xaa can be any naturally occurring amino acid
  misc_feature (399)..(399): Xaa can be any naturally occurring amino acid
  misc_feature (401)..(404): Xaa can be any naturally occurring amino acid
  misc_feature (406)..(406): Xaa can be any naturally occurring amino acid
  misc_feature (409)..(409): Xaa can be any naturally occurring amino acid
VESVSCSAAAVRTGDMESQRDLSLVPERLQRREQERQLEVERRKQKRQNQEVEKENSHFFVATFARERAAVEELLERAESVERLEEAASRLQGLQKLINDSVFFLAAYDLRQGQEALARLQAALAERRRGLQPKKRFAFKTRGKDAASSTKVDAAPGIPPAVESIQDSPLPKKAEGDLGPSWVCGFSNLESQVLEKRASELHQRDVLLTELSNCTVRLYGNPNTLRLTKAHSCKLLCGPVSTSVFLEDCSDCVLAVACQQLRIHSTKXHPHLPCRPAGPSWKTAVGIXFPPYTWSYPRSKGLXSSGLNRTKITGXMLXILAGPEXGLPXLEYFXEKXXKXXGNNXXPLXXLLXKXFXXEFSXXGPXNYLXPXGFFXXXRXKMKGPXXISIPKXKKKIFXFXXXXKXPPX

SEQ ID NO: 240 - protein, 383 aa, Homo sapiens
  misc_feature (246)..(246): Xaa can be any naturally occurring amino acid
  misc_feature (274)..(274): Xaa can be any naturally occurring amino acid
  misc_feature (278)..(278): Xaa can be any naturally occurring amino acid
  misc_feature (280)..(280): Xaa can be any naturally occurring amino acid
  misc_feature (287)..(287): Xaa can be any naturally occurring amino acid
  misc_feature (291)..(291): Xaa can be any naturally occurring amino acid
  misc_feature (295)..(295): Xaa can be any naturally occurring amino acid
  misc_feature (298)..(298): Xaa can be any naturally occurring amino acid
  misc_feature (301)..(301): Xaa can be any naturally occurring amino acid
  misc_feature (311)..(313): Xaa can be any naturally occurring amino acid
  misc_feature (317)..(317): Xaa can be any naturally occurring amino acid
  misc_feature (323)..(323): Xaa can be any naturally occurring amino acid
  misc_feature (333)..(334): Xaa can be any naturally occurring amino acid
  misc_feature (337)..(337): Xaa can be any naturally occurring amino acid
  misc_feature (343)..(343): Xaa can be any naturally occurring amino acid
  misc_feature (345)..(346): Xaa can be any naturally occurring amino acid
  misc_feature (350)..(350): Xaa can be any naturally occurring amino acid
  misc_feature (352)..(353): Xaa can be any naturally occurring amino acid
  misc_feature (357)..(357): Xaa can be any naturally occurring amino acid
  misc_feature (362)..(362): Xaa can be any naturally occurring amino acid
  misc_feature (366)..(367): Xaa can be any naturally occurring amino acid
  misc_feature (369)..(370): Xaa can be any naturally occurring amino acid
  misc_feature (372)..(372): Xaa can be any naturally occurring amino acid
  misc_feature (376)..(379): Xaa can be any naturally occurring amino acid
  misc_feature (383)..(383): Xaa can be any naturally occurring amino acid
GQGKMVDYSVWDHIEVSDDEDETHPNIDTASLFRWRHQARVERMEQFQKEKEELDRGCRECKRKVAECQRKLKELEVAEGGKAELERLQAEAQQLRKEERSWEQKLEEMRKKEKSMPWNVDTLSKDGFSKSMVNTKPEKTEEDSEEVREQKHKTFVEKYEKQIKHFGMLRRWDDSQKYLSDNVHLVCEETANYLVIWCIDLEVEEKCALMEQVAHQTIVMQFILELAKSLKVDPRACFRQFFTKIXTADRQYMEGFNDELEAFKERVRGRAKLXIEKXRXTRRRTAXSGSXRRPXPVXVYXSFPENSKMLXXXDLQXLQNPFXKWTPRPNYPXXLLXLALVPXLXXSQEXKXXLGPXELFQXAKKXXLXXIXPLFXXXXFKKX

SEQ ID NO: 241 - protein, 304 aa, Homo sapiens
  misc_feature (275)..(276): Xaa can be any naturally occurring amino acid
  misc_feature (284)..(285): Xaa can be any naturally occurring amino acid
  misc_feature (287)..(287): Xaa can be any naturally occurring amino acid
  misc_feature (294)..(294): Xaa can be any naturally occurring amino acid
  misc_feature (299)..(299): Xaa can be any naturally occurring amino acid
GQMADFDTYDDRAYSSFGGGRGSRGSAGGHGSRSQKELPTEPPYTAYVGNLPFNTVQGDIDAIFKDLSIRSVRLVRDKDTDKFKGFCYVEFDEVDSLKEALTYDGALLGDRSLRVDIAEGRKQDKGGFGFRKGGPDDRGFRDDFLGGRGGSRPGDRRTGPPMGSRFRDGPPLRGSNMDFREPTEEERAQRPRLQLKPRTVATPLNQVANPNSAIFGGARPREEVVQKEQEACGWEGMGRGGLEQDHSLVSPRAAVLQPPLLRLPLASSQRKTQLXXCMSAVNKXXFXTFLGLCXIYLGXGWGVF

SEQ ID NO: 242 - protein, 288 aa, Homo sapiens
  misc_feature (288)..(288): Xaa can be any naturally occurring amino acid
AHASASGAQDDLRKVTRIAYSMVKQFGMAPGIGPISFPEAQEGLMGIGQRPFSQGLQQMMDHEARLLVAKAYRHTEKVLQDNLDKLQALANALLEKEVINYEDIEALIGPPPHGPKKMIAPQRWIDAQREKQDLGEEETEETQQPPLGGEEPTWPKLGGVGCTCGWSGKGLTQPPVAFQLRFALPLAALSSPCTVTSEICLMTLFMILSFSAETTDGVLCLVVSPMGKVISASRVSMEHFEFPGLTVVPSVAEATQRQQSIQTPNRPLFMPTLARPPQFLWLPRNAKX

SEQ ID NO: 243 - protein, 320 aa, Homo sapiens
  misc_feature (320)..(320): Xaa can be any naturally occurring amino acid
AASVKDLPGLKTPVGRGRAWLRLALMQKKLSEYMKALINKKELLSEFYEPNALMMEEEGAIIAGLLVGLNVIDANFCMKGEDLDSQVGVIDFSMYLKDGNSSKGTEGDGQITAILDQKNYVEELNRHLNATVNNLQAKVDALEKSNTKLTEELAVANNRIITLQEEMERVKEESSYILESNRKGPKQDRTAEGQALSEARKHLKEETQLRLDVEKELEMQISMRQEMELAMKMLEKDVCEKQDALVSLRQQLDDLRALKHELAFKLQSSDLGVKQKSELNSRLEEKTNQMAATIKQLEQSEKDLVKQAKTLNSAANKLIX

SEQ ID NO: 244 - protein, 136 aa, Homo sapiens
GDIVDIKGMGTVQKGMPHKCYHGKTGRVYNVTQHAVGIVVNKQVKGKILAKRINVRIEHIKHSKSRDSFLKRVKENDQKKKEAKEKGTWVQLKRQPAPPREAHFVRTNGKEPELLEPIPYEFMAVLKKKIKDLWAT

SEQ ID NO: 245 - protein, 290 aa, Homo sapiens
  misc_feature (290)..(290): Xaa can be any naturally occurring amino acid
GRKYQSKKKLNLFKLTPFMVNSVLAEGKGGFIRAKLVCKTLENFFASADEELTIDHVPIWCKNSQGQRVMVEQSEKLNGVLEASRLWDNMRKLGECTEEAHQMTHDGYLKLWQLSKPSLASFDAIFVDEAQDCTPAIMNIVLSQPCGKIFVGDPHQQIYTFRGAVNALFTVPHTHVFYLTQSFRFGVEIAYVGATILDVCKRVRKKTLVGGNHQSGIRGDAKGQVALLSRTNANVFDEAVRVTEGEFPSRIHLIGGIKSFGLDRIIDIWILLQPEEERRKQNLVIKDKFX

SEQ ID NO: 246 - protein, 281 aa, Homo sapiens
DHVEMARERSKTVTSFYNQSAIDAAAEKPSVRLTPTMMLYAGRSQDGSHLLKSARYLQQELPVRIAHRIKGFRCLPFIIGCNPTILHVHELYIRAFQKLTDFPPIKDQADEAQYCQLVRQLLDDHKDVVTLLAEGLRESRKHIEDEKLVRYFLDKTLTSRLGIRMLATHHLALHEDKPDFVGIICTRLSPKKIIEKWVDFARRLCEHKYGNAPRVRINGHVAARFPFIPMPLDYILPELLKNAMRATMESHLDTPYNVPDVVITIANNDVDLIIRISDRGG

SEQ ID NO: 247 - protein, 292 aa, Homo sapiens
ELFSRIFNCNPDDMARDLEQGDVSETIRVFFEQSKSFPPAAKSLLTIQEVDEFLLRLSKLTKEDEQQQALQDIASRCTANDLKCIIRLIKHDLKMNSGAKHVLDALDPNAYEAFKASRNLQDVVERVLHNAQEVEKEPGQRRALSVQASLMTPVQPMLAEACKSVEYAMKKCPNGMFSEIKYDGERVQVHKNGDHFSYFSRSLKPVLPHKVAHFKDYIPQAFPGGHSMILDSEVLLIDNKTGKPLPFGTLGVHKKAAFQDANVCLFVFDCIYFNDVSLMDRPLCERRKFLHD

SEQ ID NO: 248 - protein, 367 aa, Homo sapiens
  misc_feature (272)..(272): Xaa can be any naturally occurring amino acid
  misc_feature (280)..(281): Xaa can be any naturally occurring amino acid
  misc_feature (289)..(289): Xaa can be any naturally occurring amino acid
  misc_feature (298)..(298): Xaa can be any naturally occurring amino acid
  misc_feature (301)..(301): Xaa can be any naturally occurring amino acid
  misc_feature (307)..(307): Xaa can be any naturally occurring amino acid
  misc_feature (309)..(309): Xaa can be any naturally occurring amino acid
  misc_feature (321)..(321): Xaa can be any naturally occurring amino acid
  misc_feature (327)..(327): Xaa can be any naturally occurring amino acid
  misc_feature (330)..(330): Xaa can be any naturally occurring amino acid
  misc_feature (332)..(332): Xaa can be any naturally occurring amino acid
  misc_feature (351)..(351): Xaa can be any naturally occurring amino acid
  misc_feature (355)..(359): Xaa can be any naturally occurring amino acid
  misc_feature (361)..(361): Xaa can be any naturally occurring amino acid
  misc_feature (363)..(363): Xaa can be any naturally occurring amino acid
  misc_feature (365)..(365): Xaa can be any naturally occurring amino acid
GEIGEATEHLTQLEADLTDVQDENFNANHALSGLERDRLALNLTLRQLDQHLDLLKHSNFLGAYDSIRHAHSQSAEAERRANTSALAVPSPVSNSASARHRTEALMDAQKEDFNSKHMANQRALGKLSAHTHTLSLTDINELVCGAPGDAPCATSPCGGAGCRDEDGQPRCGGLSCNGAAATADLALGRARHTQAELQRALAEGGSILSRVAETRRQASEAQQRAQAALDKANASRGTGGTGQPGTSRTYPECEGLPQPGGGSHNGGHTGAXALHPSFSXXPAPGGCDXQNESGTWQXWMXSWHYCXKXASCQTLLQNARXQELGDXKQXQXVRPPRRPPAKGLPGPSGGXGEPXXXXXFXLXKXGG

SEQ ID NO: 249 - protein, 315 aa, Homo sapiens
  misc_feature (212)..(212): Xaa can be any naturally occurring amino acid
  misc_feature (216)..(216): Xaa can be any naturally occurring amino acid
  misc_feature (242)..(242): Xaa can be any naturally occurring amino acid
  misc_feature (245)..(245): Xaa can be any naturally occurring amino acid
  misc_feature (247)..(247): Xaa can be any naturally occurring amino acid
  misc_feature (253)..(253): Xaa can be any naturally occurring amino acid
  misc_feature (257)..(257): Xaa can be any naturally occurring amino acid
  misc_feature (259)..(259): Xaa can be any naturally occurring amino acid
  misc_feature (265)..(266): Xaa can be any naturally occurring amino acid
  misc_feature (269)..(271): Xaa can be any naturally occurring amino acid
  misc_feature (273)..(274): Xaa can be any naturally occurring amino acid
  misc_feature (279)..(281): Xaa can be any naturally occurring amino acid
  misc_feature (283)..(283): Xaa can be any naturally occurring amino acid
  misc_feature (286)..(286): Xaa can be any naturally occurring amino acid
  misc_feature (289)..(289): Xaa can be any naturally occurring amino acid
  misc_feature (294)..(294): Xaa can be any naturally occurring amino acid
  misc_feature (300)..(303): Xaa can be any naturally occurring amino acid
  misc_feature (305)..(306): Xaa can be any naturally occurring amino acid
  misc_feature (308)..(308): Xaa can be any naturally occurring amino acid
  misc_feature (311)..(311): Xaa can be any naturally occurring amino acid
  misc_feature (313)..(313): Xaa can be any naturally occurring amino acid
  misc_feature (315)..(315): Xaa can be any naturally occurring amino acid
GKSMEREGYESSGNDDYRGSYNTVLSQPLFEKQDREGPASTGSKLTIQEHLYPAPSSPEKEQLLDRRPTECMMSRSVDHLERPTSFPRPGQLICCSSVDQVNDSVYRKVLPALVIPAHYMKLPGDHSYVSQPLVVPADQQLEIERLQAELSNPHAGIFPHPSSQIQPQPLSSQAISQQHLQDAGTREWSPQNASMSESLSIPASLNDAALAXMNSXVQLLTEKALDGAWGVGKPLPHPRAWXRSXWXARSNAXVKTXPXSPKKLXXKRXXXDXXVLEFXXXIXMNXKSXPGKGXGNAFCXXXXKXXPXLSXKXPX

SEQ ID NO: 250 - protein, 239 aa, Homo sapiens
  misc_feature (226)..(226): Xaa can be any naturally occurring amino acid
  misc_feature (234)..(235): Xaa can be any naturally occurring amino acid
ARTSSSFAAAMARLGGAVLSFSEATSSVQKGESLADSVQTMSCYADVVVLRHPQPGAVELAAKHCRRPVINAGDGVGEHPTQALLDIFTIREELGTVNGMTITMVGDLKHGRTVHSLACLLTQYRVSLRYVAPPSLRMPPTVRAFVASRGTKQEEFESIEEALPDTDVLYMTRIQKERFGSTQEYEACFGQFILTPHIMTRAKKKMVVMHPMPRVNEKSVEVDSDXRAAYFRQXXNGMY

SEQ ID NO: 251 - protein, 209 aa, Homo sapiens
  MISC_FEATURE (1)..(209): Xaa can be any naturally occuring amino acids
GLLFMANEADLDEELVIKGSILQKHPRIRFHTGLVDAHLYCLKKYIVDFLMENGSITFYXGGEPGFHIGRKQVFLSXLTTGPRXKRGGFKXKRXRRPLKIXXGFLKKSPNPWNPGSPFKNPXWXNPXPXGKQGGEKIFXPKKXRGGRVXCXPHXKKKRGAXXXFXGXNXXXGAXXLXGKKXXXXGGPQKRGGGXXFFXPXKKTPPPFFF

SEQ ID NO: 252 - protein, 278 aa, Homo sapiens
GAPEPSTIARSLPTTVPESPNYRNTRTPRTPRTPQLKDSSQTSRFYPVVKEGRTLDAKMPRKRKTRHSSNPPLESHVGWVMDSREHRPRTASISSSPSEGTPTVGSYGCTPQSLPKFQHPSHELLKENGFTQHVYHKYRRRCLNERKRLGIGQSQEMNTLFRFWSFFLRDHFNKKMYEEFKQLALEDAKEGYRYGLECLFRYYSYGLEKKFRLDIFKDFQEETVKDYEAGQLYGLEKFWAFLKYSKAKNLDIDPKLQEYLGKFRRLEDFRVDPPMGEE

SEQ ID NO: 253 - protein, 367 aa, Homo sapiens; identical to SEQ ID NO: 248
  misc_feature (272)..(272): Xaa can be any naturally occurring amino acid
  misc_feature (280)..(281): Xaa can be any naturally occurring amino acid
  misc_feature (289)..(289): Xaa can be any naturally occurring amino acid
  misc_feature (298)..(298): Xaa can be any naturally occurring amino acid
  misc_feature (301)..(301): Xaa can be any naturally occurring amino acid
  misc_feature (307)..(307): Xaa can be any naturally occurring amino acid
  misc_feature (309)..(309): Xaa can be any naturally occurring amino acid
  misc_feature (321)..(321): Xaa can be any naturally occurring amino acid
  misc_feature (327)..(327): Xaa can be any naturally occurring amino acid
  misc_feature (330)..(330): Xaa can be any naturally occurring amino acid
  misc_feature (332)..(332): Xaa can be any naturally occurring amino acid
  misc_feature (351)..(351): Xaa can be any naturally occurring amino acid
  misc_feature (355)..(359): Xaa can be any naturally occurring amino acid
  misc_feature (361)..(361): Xaa can be any naturally occurring amino acid
  misc_feature (363)..(363): Xaa can be any naturally occurring amino acid
  misc_feature (365)..(365): Xaa can be any naturally occurring amino acid

SEQ ID NO: 254 - protein, 367 aa, Homo sapiens
  misc_feature (244)..(244): Xaa can be any naturally occurring amino acid
  misc_feature (274)..(274): Xaa can be any naturally occurring amino acid
  misc_feature (287)..(287): Xaa can be any naturally occurring amino acid
  misc_feature (289)..(289): Xaa can be any naturally occurring amino acid
  misc_feature (309)..(310): Xaa can be any naturally occurring amino acid
  misc_feature (313)..(314): Xaa can be any naturally occurring amino acid
  misc_feature (328)..(329): Xaa can be any naturally occurring amino acid
  misc_feature (331)..(333): Xaa can be any naturally occurring amino acid
  misc_feature (336)..(336): Xaa can be any naturally occurring amino acid
  misc_feature (339)..(339): Xaa can be any naturally occurring amino acid
  misc_feature (350)..(351): Xaa can be any naturally occurring amino acid
  misc_feature (353)..(353): Xaa can be any naturally occurring amino acid
  misc_feature (355)..(355): Xaa can be any naturally occurring amino acid
  misc_feature (359)..(359): Xaa can be any naturally occurring amino acid
  misc_feature (361)..(361): Xaa can be any naturally occurring amino acid
  misc_feature (364)..(364): Xaa can be any naturally occurring amino acid
  misc_feature (366)..(367): Xaa can be any naturally occurring amino acid
GLAMGNSEGCNTKKEGDLIAAQARLKDLEALLNSKEAALSTALSEKRTLEGELHDLRGQVAKLEAALGEAKKQLQDEMLRRVDAENRLQTMKEELDFQKNIYSEELRETKRRHETRLVEIDNGKQREFESRLADALQELRAQHEDQVEQYKKELEKTYSAKLDNARQSAERNSNLVGAAHEELQQSRIRIDSLSAQLSQLQKQLAAKEAKLRDLEDSLARERDTSRRLLAEKEREMAEMRARMXQQLDEYQELLDIKLALDMEIHAYRKLLEGXEERLPLSPSPTSXRXRGRASSPHPKNRVGAASPKXXTGXXESPTVFKHARITAXXLXXXNKXANXSAAHNPEHPGXXNXPXGKSXLXRFXNXX

SEQ ID NO: 255 - protein, 344 aa, Homo sapiens
  misc_feature (37)..(37): Xaa can be any naturally occurring amino acid
  misc_feature (225)..(225): Xaa can be any naturally occurring amino acid
  misc_feature (233)..(233): Xaa can be any naturally occurring amino acid
  misc_feature (236)..(236): Xaa can be any naturally occurring amino acid
  misc_feature (239)..(241): Xaa can be any naturally occurring amino acid
  misc_feature (247)..(248): Xaa can be any naturally occurring amino acid
  misc_feature (256)..(256): Xaa can be any naturally occurring amino acid
  misc_feature (263)..(263): Xaa can be any naturally occurring amino acid
  misc_feature (270)..(270): Xaa can be any naturally occurring amino acid
  misc_feature (274)..(275): Xaa can be any naturally occurring amino acid
  misc_feature (279)..(279): Xaa can be any naturally occurring amino acid
  misc_feature (281)..(281): Xaa can be any naturally occurring amino acid
  misc_feature (284)..(284): Xaa can be any naturally occurring amino acid
  misc_feature (293)..(293): Xaa can be any naturally occurring amino acid
  misc_feature (296)..(296): Xaa can be any naturally occurring amino acid
  misc_feature (303)..(306): Xaa can be any naturally occurring amino acid
  misc_feature (310)..(310): Xaa can be any naturally occurring amino acid
  misc_feature (314)..(314): Xaa can be any naturally occurring amino acid
  misc_feature (317)..(317): Xaa can be any naturally occurring amino acid
  misc_feature (320)..(321): Xaa can be any naturally occurring amino acid
  misc_feature (324)..(324): Xaa can be any naturally occurring amino acid
  misc_feature (327)..(329): Xaa can be any naturally occurring amino acid
  misc_feature (334)..(336): Xaa can be any naturally occurring amino acid
  misc_feature (341)..(341): Xaa can be any naturally occurring amino acid
  misc_feature (344)..(344): Xaa can be any naturally occurring amino acid
TEQSKSELSSRLDTLSAEKDALSGAVRQREADLLAAXSLVRETEAALSREQQRSSQEQGELQGRLAERESQEQGLRQRLLDEQFAVLRGAAAEAAGILQDAVSKLDDPLHLRCTSSPDYLVSRAQEALDAVSTLEEGHAQYLTSLADASALVAALTRFSHLAADTIINGGATSHLAPTDPADRLIDTCRECGARALELMGQLQDQQALRHMQASLVRTPLQGILXLGQELKPXSLXVRXXXLGAVVXXEMAATSAXIENAVRXIEDMMNXARHXXSGVXLXVNXKNPQLLHKXDEXYPAPGDXXXXAKEXLKTXGGXPPXXNFXPKXXXEPKPXXXSKVWXWEX

SEQ ID NO: 256 - protein, 379 aa, Homo sapiens
  misc_feature (295)..(295): Xaa can be any naturally occurring amino acid
  misc_feature (299)..(299): Xaa can be any naturally occurring amino acid
  misc_feature (301)..(301): Xaa can be any naturally occurring amino acid
  misc_feature (303)..(303): Xaa can be any naturally occurring amino acid
  misc_feature (305)..(305): Xaa can be any naturally occurring amino acid
  misc_feature (311)..(311): Xaa can be any naturally occurring amino acid
  misc_feature (314)..(315): Xaa can be any naturally occurring amino acid
  misc_feature (321)..(321): Xaa can be any naturally occurring amino acid
  misc_feature (324)..(324): Xaa can be any naturally occurring amino acid
  misc_feature (327)..(328): Xaa can be any naturally occurring amino acid
  misc_feature (332)..(332): Xaa can be any naturally occurring amino acid
  misc_feature (335)..(335): Xaa can be any naturally occurring amino acid
  misc_feature (338)..(338): Xaa can be any naturally occurring amino acid
  misc_feature (344)..(344): Xaa can be any naturally occurring amino acid
  misc_feature (349)..(351): Xaa can be any naturally occurring amino acid
  misc_feature (361)..(361): Xaa can be any naturally occurring amino acid
  misc_feature (363)..(363): Xaa can be any naturally occurring amino acid
  misc_feature (366)..(366): Xaa can be any naturally occurring amino acid
  misc_feature (368)..(369): Xaa can be any naturally occurring amino acid
  misc_feature (373)..(375): Xaa can be any naturally occurring amino acid
  misc_feature (378)..(379): Xaa can be any naturally occurring amino acid
ACRYFMHGVCKEGDNCRYSHDLSDSPYSVVCKYFQRGYCIYGDRCRYEHSKPLKQEEATATELTTKSSLAASSSLSSIVGPLVEMNTGEAESRNSNFATVGAGSEDWVNAIEFVPGQPYCGRTAPSCTEAPLQGSVTKEESEKEQTAVETKKQLCPYAAVGECRYGENCVYLHGDSCDMCGLQVLHPMDAAQRSQHIKSCIEAHEKDMELSFAVQRSKDMVCGICMEVVYEKANPSERRFGILSNCNHTYCLKCIRKWRSAKQFESKIIKSCPECRITSNFVIPSEYWVEGKRKXPKLXLXYXGXNEPTRXAGXXNEGRGXLPXWKXXVFYXHAXPWXVKKDPXKTKRXXXSKPKTGAQQXNXFRXTXXGKKXXXPPXX

SEQ ID NO: 257 - protein, 360 aa, Homo sapiens
  misc_feature (268)..(268): Xaa can be any naturally occurring amino acid
  misc_feature (280)..(280): Xaa can be any naturally occurring amino acid
  misc_feature (284)..(284): Xaa can be any naturally occurring amino acid
  misc_feature (290)..(291): Xaa can be any naturally occurring amino acid
  misc_feature (295)..(295): Xaa can be any naturally occurring amino acid
  misc_feature (305)..(305): Xaa can be any naturally occurring amino acid
  misc_feature (309)..(309): Xaa can be any naturally occurring amino acid
  misc_feature (316)..(319): Xaa can be any naturally occurring amino acid
  misc_feature (321)..(322): Xaa can be any naturally occurring amino acid
  misc_feature (325)..(325): Xaa can be any naturally occurring amino acid
  misc_feature (328)..(328): Xaa can be any naturally occurring amino acid
  misc_feature (334)..(334): Xaa can be any naturally occurring amino acid
  misc_feature (338)..(338): Xaa can be any naturally occurring amino acid
  misc_feature (344)..(345): Xaa can be any naturally occurring amino acid
  misc_feature (356)..(356): Xaa can be any naturally occurring amino acid
  misc_feature (360)..(360): Xaa can be any naturally occurring amino acid
AARGLTDWIEFEEIADLEERAKSQFFEKVHEEVVLKTQEAAKEKEFQSVPAGPAGAVESCEICQEQFEQYWDEEEEEWHLKNAIRVDGKIYHPSCYEDYQNTSSFDCTPSPSKTPVENPLNIMLNIVKNELQEPCDSPKVKEERIDTPPACTEESIATPSEIKTENDTVESVIKERYVFLFKSCCWIKVKNFFMYITYLYKLSGGRAFSYHLVNKYILVFAFPTACRVSGACCVKVLMCANLTKNCMCKNVRFFTVQLIINKNIFAIXGVYLCTPSNSFXYFLXGKMGLXXTPTXFFLVPSPDRXRFEXPPSKGGXXXXPXXLFXKKXRFKILXKKRXIFAKLXXITQPLPGKTPXVPFX

SEQ ID NO: 258 - protein, 344 aa, Homo sapiens
  misc_feature (285)..(285): Xaa can be any naturally occurring amino acid
  misc_feature (287)..(287): Xaa can be any naturally occurring amino acid
  misc_feature (300)..(303): Xaa can be any naturally occurring amino acid
  misc_feature (305)..(305): Xaa can be any naturally occurring amino acid
  misc_feature (307)..(308): Xaa can be any naturally occurring amino acid
  misc_feature (313)..(314): Xaa can be any naturally occurring amino acid
  misc_feature (325)..(325): Xaa can be any naturally occurring amino acid
  misc_feature (328)..(328): Xaa can be any naturally occurring amino acid
  misc_feature (336)..(338): Xaa can be any naturally occurring amino acid
  misc_feature (340)..(342): Xaa can be any naturally occurring amino acid
VKKVEKSVNEVMEWMNNVMNAQAKKSLDQDPVVRAQEIKTKIKELNNTCEPVVTQPKPKIESPKLERTPNGPNIDKKEEDLEDKNNFGAEPPHQNGECYPNEKNSVNMDLDITLNWPIPSINKIFLPYVTLHNILKLFIFSFLRIFRNFVYYMEKEKKLKSVVFMILKGKIALVTFRFLWNCEFILSFLCSLTICITEDETDFCLLEKKNCTACSRGLLKSLSICSCQGSFLAFCSPFSMCVGVDVYKQDVLHKGFLKPFLSQKKMTFLLYKFNENKSLVQRGPXCXTKTFNLPLPLTEXXXXKXGXXNGPSXXTDWDPFLTFKXSPXGGLSKKKXXXKXXXGR

SEQ ID NO: 259 - protein, 157 aa, Homo sapiens
  misc_feature (157)..(157): Xaa can be any naturally occurring amino acid
GDSEMEGCVSNLMVCNLAYSGKLEELKESILADKSLATRTDQDSRTALHWACSAGHTEIVEFLLQLGVPVNDKDDAGWSPLHIAASAGRDEIVKALLGKGAQVNAVNQNGCTPLHYAASKNRHEIAVMLLEGGANPDAKDHYEATAMHRAAAKGNLX

SEQ ID NO: 260 - protein, 303 aa, Homo sapiens
  misc_feature (247)..(247): Xaa can be any naturally occurring amino acid
  misc_feature (249)..(249): Xaa can be any naturally occurring amino acid
  misc_feature (251)..(251): Xaa can be any naturally occurring amino acid
  misc_feature (254)..(254): Xaa can be any naturally occurring amino acid
  misc_feature (256)..(256): Xaa can be any naturally occurring amino acid
  misc_feature (261)..(263): Xaa can be any naturally occurring amino acid
  misc_feature (265)..(265): Xaa can be any naturally occurring amino acid
  misc_feature (273)..(273): Xaa can be any naturally occurring amino acid
  misc_feature (278)..(278): Xaa can be any naturally occurring amino acid
  misc_feature (280)..(280): Xaa can be any naturally occurring amino acid
  misc_feature (283)..(283): Xaa can be any naturally occurring amino acid
  misc_feature (288)..(290): Xaa can be any naturally occurring amino acid
  misc_feature (292)..(293): Xaa can be any naturally occurring amino acid
  misc_feature (295)..(297): Xaa can be any naturally occurring amino acid
  misc_feature (299)..(300): Xaa can be any naturally occurring amino acid
  misc_feature (303)..(303): Xaa can be any naturally occurring amino acid
GCDDSALARSPARGLLGSRLSKIYSQSTLSLSTVANEAHNNLGVKRPTSRAPSPSGLMSPSRLPGSRERDWENGSNASSPASVPEYTGPRLYKEPSAKSNKFIIHNALSHCCLAGKVNEPQKNRILEEIEKSKANHFLILFRDSSCQFRALYTLSGETEELSRLAGYGPRTVTPAMVEGIYKYNSDRKRFTQIPAKTMSMSVDAFTIQGHLWQGKKPTTPKKGGGTPKPHPGGPRAGPCVLRPLPIXSXIXLNXLXLDSCXXXPXNSIWICSXRSVAXGXFFXGENPXXXGXXFXXXRXXKWX

SEQ ID NO: 261 - protein, 379 aa, Homo sapiens; identical to SEQ ID NO: 256
  misc_feature (295)..(295): Xaa can be any naturally occurring amino acid
  misc_feature (299)..(299): Xaa can be any naturally occurring amino acid
  misc_feature (301)..(301): Xaa can be any naturally occurring amino acid
  misc_feature (303)..(303): Xaa can be any naturally occurring amino acid
  misc_feature (305)..(305): Xaa can be any naturally occurring amino acid
  misc_feature (311)..(311): Xaa can be any naturally occurring amino acid
  misc_feature (314)..(315): Xaa can be any naturally occurring amino acid
  misc_feature (321)..(321): Xaa can be any naturally occurring amino acid
  misc_feature (324)..(324): Xaa can be any naturally occurring amino acid
  misc_feature (327)..(328): Xaa can be any naturally occurring amino acid
  misc_feature (332)..(332): Xaa can be any naturally occurring amino acid
  misc_feature (335)..(335): Xaa can be any naturally occurring amino acid
  misc_feature (338)..(338): Xaa can be any naturally occurring amino acid
  misc_feature (344)..(344): Xaa can be any naturally occurring amino acid
  misc_feature (349)..(351): Xaa can be any naturally occurring amino acid
  misc_feature (361)..(361): Xaa can be any naturally occurring amino acid
  misc_feature (363)..(363): Xaa can be any naturally occurring amino acid
  misc_feature (366)..(366): Xaa can be any naturally occurring amino acid
  misc_feature (368)..(369): Xaa can be any naturally occurring amino acid
  misc_feature (373)..(375): Xaa can be any naturally occurring amino acid
  misc_feature (378)..(379): Xaa can be any naturally occurring amino acid

SEQ ID NO: 262 - protein, 305 aa, Homo sapiens; identical to SEQ ID NO: 189
  misc_feature (209)..(209): Xaa can be any naturally occurring amino acid
  misc_feature (215)..(215): Xaa can be any naturally occurring amino acid
  misc_feature (218)..(218): Xaa can be any naturally occurring amino acid
  misc_feature (236)..(236): Xaa can be any naturally occurring amino acid
  misc_feature (241)..(241): Xaa can be any naturally occurring amino acid
  misc_feature (245)..(245): Xaa can be any naturally occurring amino acid
  misc_feature (250)..(250): Xaa can be any naturally occurring amino acid
  misc_feature (252)..(252): Xaa can be any naturally occurring amino acid
  misc_feature (255)..(255): Xaa can be any naturally occurring amino acid
  misc_feature (257)..(257): Xaa can be any naturally occurring amino acid
  misc_feature (260)..(261): Xaa can be any naturally occurring amino acid
  misc_feature (264)..(264): Xaa can be any naturally occurring amino acid
  misc_feature (268)..(269): Xaa can be any naturally occurring amino acid
  misc_feature (277)..(278): Xaa can be any naturally occurring amino acid
  misc_feature (280)..(282): Xaa can be any naturally occurring amino acid
  misc_feature (285)..(285): Xaa can be any naturally occurring amino acid
  misc_feature (289)..(289): Xaa can be any naturally occurring amino acid
  misc_feature (292)..(292): Xaa can be any naturally occurring amino acid
  misc_feature (294)..(295): Xaa can be any naturally occurring amino acid
  misc_feature (298)..(301): Xaa can be any naturally occurring amino acid
  misc_feature (305)..(305): Xaa can be any naturally occurring amino acid

SEQ ID NO: 263 - protein, 240 aa, Homo sapiens; identical to SEQ ID NO: 200
  misc_feature (142)..(142): Xaa can be any naturally occurring amino acid
  misc_feature (162)..(162): Xaa can be any naturally occurring amino acid
  misc_feature (171)..(171): Xaa can be any naturally occurring amino acid
  misc_feature (181)..(181): Xaa can be any naturally occurring amino acid
  misc_feature (185)..(185): Xaa can be any naturally occurring amino acid
  misc_feature (190)..(190): Xaa can be any naturally occurring amino acid
  misc_feature (196)..(196): Xaa can be any naturally occurring amino acid
  misc_feature (201)..(201): Xaa can be any naturally occurring amino acid
  misc_feature (203)..(203): Xaa can be any naturally occurring amino acid
  misc_feature (205)..(206): Xaa can be any naturally occurring amino acid
  misc_feature (208)..(209): Xaa can be any naturally occurring amino acid
  misc_feature (212)..(212): Xaa can be any naturally occurring amino acid
  misc_feature (218)..(220): Xaa can be any naturally occurring amino acid
  misc_feature (222)..(222): Xaa can be any naturally occurring amino acid
  misc_feature (225)..(225): Xaa can be any naturally occurring amino acid
  misc_feature (229)..(230): Xaa can be any naturally occurring amino acid
  misc_feature (234)..(236): Xaa can be any naturally occurring amino acid
  misc_feature (238)..(238): Xaa can be any naturally occurring amino acid
  misc_feature (240)..(240): Xaa can be any naturally occurring amino acid

SEQ ID NO: 264 - protein, 353 aa, Homo sapiens
GGGGGSSMDWGTELWDQFEVLERHTQWGLDLLDRYVKFVKERTEVEQAYAKQLRSLVKKYLPKRPAKDDPESKFSQQQSFVQILQEVNDFAGQRELVAENLSVRVCLELTKYSQEMKQERKMHFQEGRRAQQQLENGFKQLENSKRKFERDCREAEKAAQTAERLDQDINATKADVEKAKQQAHLRSHMAEESKNEYAAQLQRFNRDQAHFYFSQMPQIFDKLQDMDERRATRLGAGYGLLSEAELEVVPIIAKCLEGMKVAANAVDPKNDSHVLIELHKSGFARPGDVEIEDFSQPMNRAPSDSSLGTPSDGRPDSEARVAAAPALAFGRDRQCDEIHLPQEQQRNGSTAVG

SEQ ID NO: 265 - protein, 391 aa, Homo sapiens
  misc_feature (273)..(273): Xaa can be any naturally occurring amino acid
  misc_feature (280)..(280): Xaa can be any naturally occurring amino acid
  misc_feature (285)..(285): Xaa can be any naturally occurring amino acid
  misc_feature (301)..(301): Xaa can be any naturally occurring amino acid
  misc_feature (304)..(305): Xaa can be any naturally occurring amino acid
  misc_feature (315)..(315): Xaa can be any naturally occurring amino acid
  misc_feature (317)..(317): Xaa can be any naturally occurring amino acid
  misc_feature (321)..(321): Xaa can be any naturally occurring amino acid
  misc_feature (324)..(324): Xaa can be any naturally occurring amino acid
  misc_feature (334)..(334): Xaa can be any naturally occurring amino acid
  misc_feature (336)..(337): Xaa can be any naturally occurring amino acid
  misc_feature (340)..(340): Xaa can be any naturally occurring amino acid
  misc_feature (343)..(344): Xaa can be any naturally occurring amino acid
  misc_feature (348)..(348): Xaa can be any naturally occurring amino acid
  misc_feature (350)..(350): Xaa can be any naturally occurring amino acid
  misc_feature (354)..(354): Xaa can be any naturally occurring amino acid
  misc_feature (356)..(356): Xaa can be any naturally occurring amino acid
  misc_feature (358)..(358): Xaa can be any naturally occurring amino acid
  misc_feature (362)..(362): Xaa can be any naturally occurring amino acid
  misc_feature (370)..(371): Xaa can be any naturally occurring amino acid
  misc_feature (373)..(374): Xaa can be any naturally occurring amino acid
  misc_feature (377)..(377): Xaa can be any naturally occurring amino acid
  misc_feature (383)..(385): Xaa can be any naturally occurring amino acid
  misc_feature (387)..(387): Xaa can be any naturally occurring amino acid
ARGQLRPPGSTGGAGGGKMSVPGPYQAATGPSSAPSAPPSYEETVAVNSYYPTPPAPMPGPTTGLVTGPDGKGMNPPSYYTQPAPIPNNNPITVQTVYVQHPITFLDRPIQMCCPSCNKMIVSQLSYNAGALTWLSCGSLCLLGCIAGCCFIPFCVDALQDVDHYCPNCRALLGTYKRLDSARRGGSRVPQEVLSTSHPASRLVEVLPWWSHLSRGPTFMSSFGGNTSQNQISKPQKLLLGVVHRTCKDIPLECQFHGFLPPDPVLPSNCDHXPYPNIFXVICHXWLFFPASMGLSGGILXLKXXVALFFEAVLXKXRLNXPLXPNIILSVSSXPXXKNXAKXXGWVXKXVTAXFXTXKFPXLNFFFKKXXGXXNPXKNFPRXXXLXKKRG

SEQ ID NO: 266 - protein, 447 aa, Homo sapiens
  misc_feature (221)..(221): Xaa can be any naturally occurring amino acid
  misc_feature (235)..(235): Xaa can be any naturally occurring amino acid
  misc_feature (252)..(252): Xaa can be any naturally occurring amino acid
RKANPQDKVHPNKAEFIRAKYQMLAFVHRLPCRDDDSVTAKDLSKQLHSSVRTGNLETCLRLLSLGAQANFFHPEKGNTPLHVASKAGQILQAELLAVYGADPGTQDSSGKTPVDYARQGGHHELAERLVEIQYELTDRLAFYLCGRKPDHKNGQHFIIPQMADSSLDLSELAKAAKKKLQSLSNHLFEELAMDVYDEVDRRETDAVWLGTQNHSALVTEXTVVPFLPGHPEYSXTRNQGRQKVARFNAHEXATLVIDILSDARRDGKAVPSPGQRTCGAHTENHHYQPGVKVKTTITRLRRALNETQNWEPLKQNNRKNWFGKWLFWEGAPPLGDFPKRGLQKKIESPPKKKKGAPPPGPQNRWDPRENPKTPTPGVFTTPGPRGFFLKTPSRGYCREEGEKPVPPFIPREKNVFSSAQNPPVFSSKKKNSSFLPPRPKKEGGASP

SEQ ID NO: 267 - protein, 274 aa, Homo sapiens
  misc_feature (274)..(274): Xaa can be any naturally occurring amino acid
AHASVLLKKKRYQEQLLDRTENQISSLEAMVQSIEFTQIEMKVMEGLQFGNECLNKMHQVMSIEEVERILDETQEAVEYQRQIDELLAGSFTQEDEDAILEELSAITQGQAEAVPEDPRKRPCQGQAQAGGAGGSFVTWPRLVGLTGMPQGLWPTESLGHGQPLTGFPGAQCARCAELQPRRRIAGGLQSVSWRPATHSGATGLLSVRINSRPSPASAGCGLPRWPRPRPNASGAVPLQSQPRVARARLGRHLQTLGSPRFLLLLAAPISWCRX

SEQ ID NO: 268 - protein, 359 aa, Homo sapiens
  misc_feature (276)..(276): Xaa can be any naturally occurring amino acid
  misc_feature (288)..(288): Xaa can be any naturally occurring amino acid
  misc_feature (293)..(293): Xaa can be any naturally occurring amino acid
  misc_feature (297)..(297): Xaa can be any naturally occurring amino acid
  misc_feature (302)..(302): Xaa can be any naturally occurring amino acid
  misc_feature (307)..(307): Xaa can be any naturally occurring amino acid
  misc_feature (310)..(310): Xaa can be any naturally occurring amino acid
  misc_feature (313)..(313): Xaa can be any naturally occurring amino acid
  misc_feature (315)..(315): Xaa can be any naturally occurring amino acid
  misc_feature (321)..(321): Xaa can be any naturally occurring amino acid
  misc_feature (327)..(327): Xaa can be any naturally occurring amino acid
  misc_feature (330)..(330): Xaa can be any naturally occurring amino acid
  misc_feature (332)..(333): Xaa can be any naturally occurring amino acid
  misc_feature (335)..(335): Xaa can be any naturally occurring amino acid
  misc_feature (340)..(343): Xaa can be any naturally occurring amino acid
  misc_feature (345)..(345): Xaa can be any naturally occurring amino acid
  misc_feature (347)..(347): Xaa can be any naturally occurring amino acid
  misc_feature (352)..(353): Xaa can be any naturally occurring amino acid
  misc_feature (356)..(356): Xaa can be any naturally occurring amino acid
  misc_feature (358)..(359): Xaa can be any naturally occurring amino acid
ALGTSMYGKGKSNSSAVPSDSQAREKLALYVYEYLLHVGAQKSAQTFLSEIRWEKNITLGEPPGFLHSWWCVFWDLYCAAPERRETCEHSSEAKAFHDYSAAAAPSPVLGNIPPGDGMPVGPVPPGFFQALGGVPGSQPLLPSGMDPTRQQGHPNMGGPMQRMTPPRGMVPLGPQNYGGAMRPPLNALGGPGMPGMNMGPGGGRPWPNPTNANSIPYSSASPGNYVGPPGGGGPPGTPIMPSPADSTNSGDNMYTLMNAVPPGPNRPNFPMGPGSXGSHGWIRRNGVXSHEWXLAQXIWTVXPKILXNEXIIXRXLQGMMXKMGGKXSIXFXXEXYSPNXXXXGXIXYQVPXXKPXGXX

SEQ ID NO: 269 - protein, 254 aa, Homo sapiens
  misc_feature (234)..(234): Xaa can be any naturally occurring amino acid
  misc_feature (248)..(248): Xaa can be any naturally occurring amino acid
  misc_feature (254)..(254): Xaa can be any naturally occurring amino acid
EVLWVPGSDHAGIATQAVVEKQLWKERGVRRHELSREAFLREVWQWKEAKGGEICEQLRALGASLDWDRECFTMDVGSSVAVTEAFVRLYKAGLLYRNHQLVNWSCALRSAISDIEVENRPLPGHTQLRLPGCPTPVSFGLLFSVAFPVDGEPDAEVVVGTTRPETLPGDVAVAVHPDDSRYTHLHGRQLRHPLMGQPLPLITDYAVQPHVGHGGSEGDSSSQSCRCNGGPDMXLSPLECHCGRMGPXTSPLGX

SEQ ID NO: 270 - protein, 255 aa, Homo sapiens
  misc_feature (193)..(193): Xaa can be any naturally occurring amino acid
  misc_feature (210)..(210): Xaa can be any naturally occurring amino acid
  misc_feature (212)..(212): Xaa can be any naturally occurring amino acid
  misc_feature (225)..(225): Xaa can be any naturally occurring amino acid
  misc_feature (238)..(238): Xaa can be any naturally occurring amino acid
  misc_feature (249)..(249): Xaa can be any naturally occurring amino acid
GADIETIGEILKKIIPTLEEGLQLPSPTATSQLPLESDAVECLNYQHYKGSDFDCELRLLIHQSLAGGIIGVKGAKIKELRENTQTTIKLFQECCPHSTDRVVLIGGKPDRVVECIKIILDLISESPIKGRAQPYDPNFYDETYDYGGFTMMFDDRRGRPVGFPMRGRGGFDRMPPGRGGRPMPPSSRARNLXLSLHHHHLEGGDLMALXTXRGRPGRPVTTAWXGFRGMKLGDSGNXITGSPIQKWQXGLNETP

SEQ ID NO: 271 - protein, 359 aa, Homo sapiens
  misc_feature (240)..(240): Xaa can be any naturally occurring amino acid
  misc_feature (260)..(260): Xaa can be any naturally occurring amino acid
  misc_feature (262)..(262): Xaa can be any naturally occurring amino acid
  misc_feature (278)..(278): Xaa can be any naturally occurring amino acid
  misc_feature (280)..(280): Xaa can be any naturally occurring amino acid
  misc_feature (282)..(282): Xaa can be any naturally occurring amino acid
  misc_feature (285)..(285): Xaa can be any naturally occurring amino acid
  misc_feature (290)..(290): Xaa can be any naturally occurring amino acid
  misc_feature (296)..(296): Xaa can be any naturally occurring amino acid
  misc_feature (299)..(299): Xaa can be any naturally occurring amino acid
  misc_feature (303)..(303): Xaa can be any naturally occurring amino acid
  misc_feature (312)..(312): Xaa can be any naturally occurring amino acid
  misc_feature (316)..(316): Xaa can be any naturally occurring amino acid
  misc_feature (319)..(320): Xaa can be any naturally occurring amino acid
  misc_feature (324)..(325): Xaa can be any naturally occurring amino acid
  misc_feature (330)..(332): Xaa can be any naturally occurring amino acid
  misc_feature (334)..(334): Xaa can be any naturally occurring amino acid
  misc_feature (337)..(337): Xaa can be any naturally occurring amino acid
  misc_feature (339)..(339): Xaa can be any naturally occurring amino acid
  misc_feature (341)..(341): Xaa can be any naturally occurring amino acid
  misc_feature (345)..(345): Xaa can be any naturally occurring amino acid
  misc_feature (349)..(349): Xaa can be any naturally occurring amino acid
  misc_feature (354)..(354): Xaa can be any naturally occurring amino acid
  misc_feature (356)..(357): Xaa can be any naturally occurring amino acid
  misc_feature (359)..(359): Xaa can be any naturally occurring amino acid
SRHLVGAKPTPGSEQQPLRCPWPVSFHLSTSMGNIFANLFKGLFGKKEMRILMVGLDAAGKTTILYKLKLGEIVTTIPTIGFNVETVEYKNISFTVWDVGGQDKIRPLWRHYFQNTQGLIFVVDSNDRERVNEAREELMRMLAEDELRDAVLLVFANKQDLPNAMNAAEITDKLGLHSLRHRNWYIQATCATSGDGLYEGLDWLSNQLRNQKTRPPSLSLLLPSALLSCGKTCGSWCECXKLPPWFWSPCASHRAVNVAXAXCGPGFLFNVNSFCFQXRXFXGTXCNITXFFLLKXKIXSLFXAEKGMAHGXLASXILXXGKTXXPLGFXXXEXHFXGXVXNQTXGIFXKKLKXPXXKX

SEQ ID NO: 272 - protein, 1150 aa, Homo sapiens
MKLKKQVTVCGAAIFCVAVFSLYLMLDRVQHDPTRHQNGGNFPRSQISVLQNRIEQLEQLLEENHEIISHIKDSVLELTANAEGPPAMLPYYTVNGSWVVPPEPRPSFFSISPQDCQFALGGRGQKPELQMLTVSEELPFDNVDGGVWRQGFDISYDPHDWDAEDLQVFVVPHSHNDPGWIKTFDKYYTEQTQHILNSMVSKLQEDPRRRFLWAEVSFFAKWWDNINVQKRAAVRRLVGNGQLEIATGGWVMPDEANSHYFALIDQLIEGHQWLERNLGATPRSGWAVDPFGYSSTMPYLLRRANLTSMLIQRVHYAIKKHFAATHSLEFMWRQTWDSDSSTDIFCHMMPFYSYDVPHTCGPDPKICCQFDFKRLPGGRINCPWKVPPRAITEANVAERAALLLDQYRKKSQLFRSNVLLVPLGDDFRYDKPQEWDAQFFNYQRLFDFFNSRPNLHVQAQFGTLSDYFDALYKRTGVEPGARPPGFPVLSGDFFSYADREDHYWTGYYTSRPFYKSLDRVLEAHLRGAEVLYSLAAAHARRSGLAGRYPLSDFTLLTEARRTLGLFQHHDAITGTAKEAVVVDYGVRLLRSLVNLKQVIIHAAHYLVLGDKETYHFDPEAPFLQVDDTRLSHDALPERTVIQLDSSPRFVVLFNPLEQERFSMVSLLVNSPRVRVLSEEGQPLAVQISAHWSSATEAVPDVYQVSVPVRLPALGLGVLQLQLGLDGHRTLPSSVRIYLHGRQLSVSRHEAFPLRVIDSGTSDFALSNRYMQVWFSGLTGLLKSIRRVDEEHEQQVDMQVLVYGTRTSKDKSGAYLFLPDGEAKPYVPKEPPVLRVTEGPFFSEVVAYYEHIHQAVRLYNLPGVEGLSLDISSLVDIRDYVNKELALHIHTDIDSQGIFFTDLNGFQVQPRRYLKKLPLQANFYPMPVMAYIQDAQKRLTLHTAQALGVSSLKDGQLEVILDRRLMQDDNRGLGQGLKDNKRTCNRFRLLLERRTVGSEVQDSHSTSYPSLLSHLTSMYLNAPALALPVARMQLPGPGLRSFHPLASSLPCDFHLLNLRTLQAEEDTLPSAETALILHRKGFDCGLEAKNLGFNCTTSQGKVALGSLFHGLDVVFLQPTSLTLLYPLASPSNSTDVYLEPMEIATFRLRLG

SEQ ID NO: 273 - protein, 274 aa, Homo sapiens
  misc_feature (86)..(86): Xaa can be any naturally occurring amino acid
  misc_feature (92)..(92): Xaa can be any naturally occurring amino acid
  misc_feature (122)..(122): Xaa can be any naturally occurring amino acid
  misc_feature (132)..(132): Xaa can be any naturally occurring amino acid
  misc_feature (134)..(135): Xaa can be any naturally occurring amino acid
  misc_feature (138)..(138): Xaa can be any naturally occurring amino acid
  misc_feature (149)..(149): Xaa can be any naturally occurring amino acid
  misc_feature (183)..(183): Xaa can be any naturally occurring amino acid
  misc_feature (192)..(192): Xaa can be any naturally occurring amino acid
  misc_feature (196)..(196): Xaa can be any naturally occurring amino acid
  misc_feature (203)..(203): Xaa can be any naturally occurring amino acid
  misc_feature (211)..(211): Xaa can be any naturally occurring amino acid
  misc_feature (214)..(214): Xaa can be any naturally occurring amino acid
  misc_feature (217)..(217): Xaa can be any naturally occurring amino acid
  misc_feature (220)..(220): Xaa can be any naturally occurring amino acid
  misc_feature (222)..(222): Xaa can be any naturally occurring amino acid
  misc_feature (231)..(231): Xaa can be any naturally occurring amino acid
  misc_feature (234)..(235): Xaa can be any naturally occurring amino acid
  misc_feature (237)..(238): Xaa can be any naturally occurring amino acid
  misc_feature (244)..(244): Xaa can be any naturally occurring amino acid
  misc_feature (252)..(253): Xaa can be any naturally occurring amino acid
  misc_feature (256)..(256): Xaa can be any naturally occurring amino acid
  misc_feature (258)..(258): Xaa can be any naturally occurring amino acid
  misc_feature (260)..(261): Xaa can be any naturally occurring amino acid
  misc_feature (263)..(264): Xaa can be any naturally occurring amino acid
  misc_feature (267)..(267): Xaa can be any naturally occurring amino acid
  misc_feature (270)..(270): Xaa can be any naturally occurring amino acid
  misc_feature (272)..(273): Xaa can be any naturally occurring amino acid
AHASGKSHSPSASPCPAAGVPPAASPRSPARPAAMAQPGDPRRLCRLVQEGRLRALKEELQAAGGCPGPAGDTLLHCAARHGHRDXLAYLAXAWGMDIEVTNRDYKRPLHEAASMGHRDCVXYLLGRGAAVXCXXKAXWTPLMMACTRXNLGVIQELVEHGANPLLKNKDGWNSFHIASREGXPLILQVPAXCLPXVPWNTEXKIRRTPLXTAXMHXPFXGXQSASLRGAXMNXXTXXIVGVTXLMELNSIXXTSXSXKXXPXXKNXALXFXXK

SEQ ID NO: 274 - DNA, 800 bp, Homo sapiens
  misc_feature (1)..(800): n is a, c, g, or t
ncnntcaccatcacggatcctatttaggtgacactatagaatcgtcgacccacgcgtccgggaacggagtggccggcgccggcgaagaagacccggccgcggccttcttggcgcagcaagagagcgagattgcgggcatcgagaacgacgaggccttcgccatcctggacggcggcgcccccgggccccagccgcacggcgagccgccggggggtccggatgctgttgatggagtaatgaatggtgaatactaccaggaaagtaatggtccaacagacagttatgcagctatttcacaagtgnatcgattgcagtcagagcctgaaagtatccgtaaatggagagaagaacaaatggaacgcttggaagcccttgatgccaattctcggaagcaagaagcagagtggaangaaaaggcaataaaggagctagaagaatggtatgcaagacaggacgagcnagctacagaaaacaaaagcaaacaacagggcagcagaagaanccntttgtaaatgacatttgacgagtcggtccccaggnactgnagtngggaacgggtggcccngntgtgtgaacttttacccccaagtcctagcaaggcagggcccaaanatggttctccccgcnattgcggcttcnaggtccttccattntccccctcaaaggcaggncccccggctggggggcnncntgtaanaaaacccncccccttggtgggaaaancncttannntttntgncaantattctntaaatnccctaacncgcgnggtgaagncctccnttcccngcgccctcttg

SEQ ID NO: 275 - DNA, 656 bp, Homo sapiens
  misc_feature (1)..(656): n is a, c, g, or t
catcaccatcaccatcacggatcctatttaggtgacactatagaatcgtcgacccacgcgtccgcccttgggtaccatgtctaccctacctgtaggaacacatccgggattctaggattttctgtcactgtggggactcaggcaaccaaatacaattctgaagttgttgataagaagatagaagagtttctttctagctttgaggagaagattgagaacctcactgaagaggcattcaacacccaggtcacagctctcatcaagctgaaggagtgtgaggatacccaccttggggaggaggtggataggaactggaatgaagtggttacacagcagtacctctttgaccgccttgcccacgagattgaagcactgaagtcattctcaaaatcagacctggtcaactggttcaaggcccatagagggccaggaagtaaaatgctcagcgttcatgttgttggatatgggaagtatgaactggaagaggatggtaccccttctagtgaggattcaaattcttcttgtgaagtgatgcagctgacctacctgccaacctctcctctgctggcagattgtatcatccccattactgatatcagggctttcacaacaacactcaaccttctcccctaccataaaatagtcaaataaataaa

SEQ ID NO: 276 - DNA, 1092 bp, Homo sapiens
  misc_feature (1)..(1092): n is a, c, g, or t
naantagagaaattactatgagaggatcgcatcaccatcaccatcacggatcctatttaggtgacactatagaatcgtcgacccacgcgtccgcccacgcgtccgcccacgcgtccgcccacgcgtccgcccacgcgtccgggggattggcgggatgcggcgcgccgcgcgtgaacctccttggcctgggcgaagctgtgtggaccaagcaagtcaggagtgtggccatgttttctgagcaggctgcccagagggcccacactctactgtccccaccatcagccaacaatgccacctttgcccgggtgccagtggcaacctacaccaactcctcacaacccttccggctaggagagcgcagctttagccggcagtatgcccacatttatgccacccgcctcatccaaatgagacccttcctggagaaccgggcccagcagcactggggcagtggagtgggagtgaagaagctgtgtgaactgcagcctgaggagaagtgctgtgtggtgggcactctgttcaaggccatgccgctgcagccctccatcctgcgggaggtcagcgaggagcacaacctgctcccccagcctcctcggagtaaatacatacacccagatgacgagctggtcttggaagatgaactgcagcgtatcaaactaaaaggcaccattgacgtgtcaaagctggttacggggactgtcctggctgtgtttggctccgtgagagacgacgggaagtttctggtggaggactattgctttgctgaccttgctccccagaagcccgcaccccnacttgacacagataggtttgtgctactggtgtccggccctgggcctgggtggcggtggaagcnaaancctgctggncacccagctgctggtggatgtggtgacgggcancttgggaanaaaggggancagtgcanccccgcccacgtctcccngggttatcctcgctggnaacctcctcagccacagcaccaaancaggnattttttcatnangccaaancctnacaaaaaaacccagcagccagngggaaggctttttaaangctggannaantctcntgcannnaacncccantgcc

SEQ ID NO: 277 - DNA, 1300 bp, Homo sapiens
  misc_feature (1)..(1300): n is a, c, g, or t
caatagagaaattactatgagaggatcgcatcaccatcaccatcacggatcctatttaggtgacactatagaatcgtcgacccacgcgtccgggcagggaatctggcttgattggcgtgctgagacgcacctggcgcaaccctcccttctgaatcgaagttcaagtcccgcggacactgcaaccatgaaggagagacgggccccccagccagtcgtggccagatgtaagctcgttctggtcggggacgtgcagtgtgggaagaccgcgatgttgcaagtgttagcgaaggattgctatccagagacctatgtgcccaccgtgttcgaaaattacacagcctgtttggagacagaggaacagagggtggagcttagtctctgggatacctcaggatctccctactacgataatgtccgtccactctgctacagcgactcggatgcagtattactatgttttgacatcagccgtccagagacagtggacagcgcactgaagaagtggaggacagaaatcctagattattgtcccagcacccgcgttttgctcattggctgcaagacagacctgcgaacagacctgagtactctgatggagctgtcccaccagaagcaggcgcccatctcctatgagcagggttgtgcaatagcaaagcagctgggtgcagaaatctacctggaaggctcagctttcacctcagaaaagagcatccacagcatctttcggacggcatccatgctgtgtctgaacaagcctagcccactgccccagaagagccctgtccgaagcctctccaaacgactgctccacctccccagtcgctctgaactcatctcttctaccnttcaagaangaaaaaggcccaaaagctgttccattatgtgaagtggaaattggaggggggaagacaacccccctacttcctcccttggggtgcaaaggcncggggaganggnaggatganacaatttaagaccctggacatgantttttcaaanggccccggnganggcttggaaagaaacagaatggggccgaagaaagaacccnggccccggcatgaagacctgaccctnaaaaaaaaccntntanccccaanccaggccctaaattttggaggggggcaannccccannncccccccccctccaaanaaaaaaaactttgggggaaanggggcnttctggccctctgggtttggggnccaaaaaacccccctttantttttgcctttccnaaanntttccttncngtnagggaaaggaaggnnccnaaccctnccttcccttannngncccc

SEQ ID NO: 278 - DNA, 1185 bp, Homo sapiens
  misc_feature (1)..(1185): n is a, c, g, or t
nnantagagaaattactatgagaggatcgcatcaccatcaccatcacggatcctatttaggtgacactatagaatcgtcgacccacgcgtccgggctgctggcctcggggggcggcacagctgaccgctgtatccgcttctggaacacgctgacaggacaaccactgcagtgtatcgacacgggctcccaagtgtgcaatctggcctggtccaagcacgccaacgagctggtgagcacgcacggctactcacagaaccagatccttgtctggaagtacccctccctgacccaggtggccaagctgaccgggcactcctaccgcgtgctgtacctggcaatgtcccctgatggggaggccatcgtcactggtgctggagacgagaccctgaggttctggaacgtctttagcaaaacccgttcgacaaaggagtctgtgtctgtgctcaacctcttcaccaggatccggtaaacctgccgggcaggaccgtgccacaccagctgtccagagtcggaggaccccagctcctcagcttgcatggactctgccttcccagcgcttgtcccccgaggaaggcggctgggcgggcggggagctgggcctggaggatcctggagtctcattaaatgcctgattgtgaaccatgtccaccagtatctggggtgggcacgtggtcggggaccctcagcagcaggggctctgtctcccttcccaaagggcgagaaccacattggacggtcccggctcanaccgtctgtactcagagcgacggatgccccctgggaccctcactgcctccgtctgttcatcacctgcccaccggagccgcatgctcttcntggaactgcccacgtctgcacagaacanaaccaccanacgccagggctgattggtgggggcctgaaaccccggttgcccattcatggctgcaccccaccatgtcaaacccaaaaccagccccnaggccaaacnaaggcatgnaggcctgggcaggtggctcgggnccctgggcgnaaccagcctgnggatccaanaaangtccccacctgggttttcanggattcntngaancccctttggtttnnatnntccaaaaaanattntttttggaaaaatttgttttangggccatcccccnggggtcaagnggntttaaaangggcntgnnntatntggccaaangtcc

SEQ ID NO: 279 - DNA, 1008 bp, Homo sapiens
  misc_feature (1)..(1008): n is a, c, g, or t
atagagaaattactatgagaggatcgcatcaccatcaccatcacggatcctatttaggtgacactatagaatcgtcgacccacgcgtccggccgcccgccagacgcgcccagtatgagggagatcgtgcacatccaggccggccagtgcggcaaccagatcggggccaagttctgggaagtcatcagtgatgagcatggcatcgaccccagcggcaactacgtgggcgactcggacttgcagctggagcggatcagcgtctactacaacgaggcctcttctcacaagtacgtgcctcgagccattctggtggacctggaacccggaaccatggacagtgtccgctcaggggcctttggacatctcttcaggcctgacaatttcatctttggtcagagtggggccggcaacaactgggccaagggtcactacacggagggggcggagctggtggattcggtcctggatgtggtgcggaaggagtgtgaaaactgcgactgcctgcagggcttccagctgacccactcgctggggggcggcacgggctccggcatgggcacgttgctcatcagcaaggtgcgtgaggagtatcccgaccgcatcatgaacaccttcagcgtcgtgccctcacccaaggtgtcagacacggtggtggagccctacaacgccacgctgtccatccaccagctggtggagaacacggatgagacctactgcatcgacaacgaggcgctctacgacatctgcttccgcaccctcaagctggccacgcccacctacggggacctcaaccacctggtatcggccaccatgagcggagtcaccacctccttgcgcttcccgggccagctcaacgctgacctgcgcaagctggccgtcaacatggtgcccttncccgcgcctgcacttcttnatgccccgggtttcgccccccctcacagcccnggggcagccaanaanttaccgggcccctgaccggggcccgaacttcncccaaananaatgtttc

SEQ ID NO: 280 - DNA, 1100 bp, Homo sapiens
  misc_feature (1)..(1100): n is a, c, g, or t
agagaaattactatgagaggatcgcatcaccatcaccatcacggatcctatttaggtgacactatagaatcgtcgacccacgcgtccgtgaaagccacagatcaggaaaagagcagaaaactacatgaacttacggttatgcaagatagacgagaacaagcaagacaagacttgaagggtttggaagagacagtggcaaaagaacttcagactttacacaacctgcgcaaactctttgttcaggacctggctacaagagttaaaaagagtgctgagattgattctgatgacaccggaggcagcgctgctcagaagcaaaaaatctcctttcttgaaaataatcttgaacagctcactaaagtgcacaaacagttggtacgtgataatgcagatctccgctgtgaacttcctaagttggaaaagcgacttcgagctacagctgagagagtgaaagctttggaatcagcactgaaagaagctaaagaaaatgcatctcgtgatcgcaaacgctatcagcaagaagtagatcgcataaaggaagcagtcaggtcaaagaatatggccagaagagggcattctgcacagattgctaaacctattcgtcccgggcaacatccagcagcttctccaactcacccaagtgcaattcgtggaggaggtgcatttgttcagaacagccagccagtggcagtgcgaggtggaggaggcaaacaagtgtaatcgtttatacatacccacaggtgttaaaaagtaatcgaagtacgaagaggacatggtatcaagcagtcattcaatgactataacctctactcccttgggattgtagaattataacttttaaaaaaaatgtataanttatacctggcctgtacagctgtttcctacctactcttcttgtaaactctgctgcttcccaacacaactagagtgcattttggcatcttaggagggaaaaggacagtttacaactgnggccctatttattacccagtttgncnatcgggcctaaatttagncttacngngcnagctactgtncctaaaggacggacttttggattttngggaggttatttttaaccccnttnaataccnaccgcn

SEQ ID NO: 281 - DNA, 1169 bp, Homo sapiens
  misc_feature (1)..(1169): n is a, c, g, or t
tagagaaattactatgagaggatcgcatcaccatcaccatcacggatcctatttaggtgacactatagaatcgtcgacccacgcgtccgctgcgtcgctccgggagctgccgacggacggagcgcccccgcccccgcccggccgcccgcccgccgccgccatgcccttctccaacagccacaacgcactgaagctgcgcttcccggccgaggacgagttccccgacctgagcgcccacaacaaccacatggccaaggtgctgacccccgagctgtacgcggagctgcgcgccaagagcacgccgagcggcttcacgctggacgacgtcatccagacaggcgtggacaacccgggccacccgtacatcatgaccgtgggctgcgtggcgggcgacgaggagtcctacgaagtgttcaaggatctcttcgaccccatcatcgaggaccggcacggcggctacaagcccagcgatgagcacaagaccgacctcaaccccgacaacctgcagggcggcgacgacctggaccccaactacgtgctgagctcgcgggtgcgcacgggccgcagcatccgtggcttctgcctccccccgcactgcagccgcggggagcgccgagccatcgagaagctcgcggtggaagccctgtccagcctggacggcgacctggcgggccgatactacgcgctcaagagcatgacggaggcggagcagcagcagctcatcgacgaccacttcctcttcgacaagcccgtgtcgcccctgctgctggcctcgggcatggcccgcgactggcccgacgcccgcggtatctggcacaatgacaataagaccttcttggtgtgggtcaacgaggaggaccacctgcgggtcatctccatgcaaaaggggggcaacatgaaggaggtgttnacccgcttntgcacnggncttcnccanattgaaactctcttcaagtctaaggantatgantttntgtggaancntcacctgggctanatnctcacttgcccatcnaactgggnacngggttnngggaggtgtgcatataagctgcccaactgggnaagnatgaaaattttggangtgnttaannggntgcnatttnaaaacnaggnaagggggtntggaancngttnnggngggggggttttnaagttncaaagttaan

SEQ ID NO: 282 - DNA, 1221 bp, Homo sapiens
  misc_feature (1)..(1221): n is a, c, g, or t
tagagaaattanctatgagaggatcgcatcaccatcaccatcacggatcctatttaggtgacactcctagaatcgtcgacccacgcgtccgcaaatctgaaaactcacattaagtctaaacatggtaacaatttgccatataaatgtgagcattgtccccaagcatttggtgatgagagggagcttcaacgccatctggatttgtttcaaggacataagacacaccagtgtcctcattgtgaccataagagcaccaattcaagtgaccttaagcggcacatcatatctgtccatactaaggattttcctcacaaatgtgaggtctgtgataaaggttttcatcgtccttctgagctcaaaaagcatagtgatatccataagggtaggaagattcatcagtgcaggcactgtgactttaaaacatccgatccatttattcttagtggccatatcctttcagttcatactaaagatcagccattgaaatgtaaaaggtgcaagagaggattcagacaacaaaatgagctaaaaaaacatatgaagacccatactggaaggaagatttaccaatgtgagtattgtgaatacagcactacagatgcatctggctttaaacgacatgtgatatcaatacatacaaaagactatccacacaggtgtgaattctgcaagaagggattccgaagaccatcagaaaaaaatcagcatattatgaggcaccacaaagaggctcttatgtaataagatcaatataaagaaagaagctatttaggagatatgatatgctacttgggagaaaactctcactaactgtctcaccgggtttcaaagcttgatactaaaccatgactttacattctttgtattaaagatcttaaaatatttgaattcacaggggatcccatagcccnttgaaaattactttaaagaatttaagaagccctatagaatggttacnggaaaaccttcttaagtatctgngnaaaagtattatatgcatactnaacctcngaggggaaagcaaagacaaaactttttttgggntgatatgttananacaaangttttgaaaanngaaaacnttaattganttanggnggtttggctnaagcaagncaaaccccttttntgcaatttnaaaangggncnggnaaaaaangggggccttcccngcccctnanccttgngcntttnantggncnggnaattaattcccncang

SEQ ID NO: 283 - DNA, 1094 bp, Homo sapiens
  misc_feature (1)..(1094): n is a, c, g, or t
tagagaaattactatgagaggatcgcatcaccatcaccatcacggatcctatttaggtgacactatagaatcgtcgacccacgcgtccgcggacgcgtgggcggacgcgtgggtcaagtcggcctgcaaggaagacatccccagcgaaaagagtgaggagatcactactggcagtgcctggtttagcttcctggagagccacaacaagctggacaaagacaacctctcctacattgagcacatctttgagatctcccgccgtcctgacctactcactatggtggttgactacagaacccgtgtgctgaagatctctgaggaggatgagctggacaccaagctaacccgtatccccagtgccaagaagtacaaagacattatccggcagccctctgaggaagagatcatcaaattggctcccccaccgaagaaggcctgagcaagggggaggaagaggaggaaggttggaccttcatcagaccactcccttcccccatcctccaggagagggggcaagggcaacccaccatctacccacttactaacctggtcctaacccccttactgtgcgcgtgtgtgtgcgtgtgcgcacgctctggctgtttgtctatatgtctagctcatctagttcctcttcttaaggggatgggggtcaggggctaggggagggggctgagtttccccactttaggaggaggtgggggctatttctatgcaaatagaaatcagcacattcctcctacttccctttcctccactccccccatatctttaaagtgtggaagcanaaaggacctgcattttcctacattgaggagctgacataggggtaaggtatgggagaggtaggtggatccagggnaaaagcantggggacggaangctttttcaaaaaacattaaattcncatgcagtctcananactatttanacaaagttcagttaggagcttttangatgggggagtaaactttaatgggaagggaaggctnggntgctggaaaaaagnaaaaaccnaantgggttaaanagnantcttaaantcctancccancctaangngncctgcccctntggccnntgnngnaaaancn

SEQ ID NO: 284 - DNA, 941 bp, Homo sapiens
  misc_feature (1)..(941): n is a, c, g, or t
catcaccatcaccatcacggatcctatttaggtgacactatagaatcgtcgacccacgcgtccgatgactcccagcttgaaaaggcaaatctcatagagctggaagatgacagtcacagcggaaagcggggaatcccacatagcctgagtggcctgcaagatccaattatagctcggatgtccatttgttcagaagacaagaaaagcccttccgaatgcagcttgatagccagcagccctgaagaaaactggcctgcatgccagaaagcctacaacctgaaccgaactcccagcaccgtgactctgaacaacaatagtgctccagccaacagagccaatcaaaatttcgatgagatggagggaattagggagacttctcaagtcattttgaggcctagttccagtcccaacccaaccactattcagaatgagaatctaaaaagcatgacacataagcgaagccaacgttcaagttacacaaggctctccaaagatcctccggagctccatgcagcagcctcttctgagagcacaggctttggagaagaaagagaaagcattctttgagaaaaacaagcaaaggagaagagtgttactgtacccttatgacagaattgtcctggattttgactccatccacgcccatcacctttctacattttgctgacagataactaaccgatgatgaggccgaggtaaaagagacatctgcagtgtgacagaagggagcatgagaagcatggctcaccagccagcctctgtggtctttgtaattagaagcttcagaactcactaatactactgtacctttcattggcgcattaccccataaaactttttgagacgaggtgagatctgagtataaagataggtcagaagtattttaaagggcttaatgtgccaaaagaaaaaaagctagagaccctttttgcaaacatttg

SEQ ID NO: 285 - DNA, 785 bp, Homo sapiens
  misc_feature (1)..(785): n is a, c, g, or t
tgagaggtcgcatcaccatcaccatcacggatcctatttaggtgacactatagaatcgtcgacccacgcgtccgcggacgcgtgggaagtgatttcccagtacctacaatctacccatgctcccacacacagcgactataccatgaccttgctggatttgtttgaagtggagaaggatggtgagaaagaagccttcagagaggaccttcataacaggatgcttctatggcatggttccaggatgagtaactgggtgggaatcttgagccatgggcttcgaattgccccacctgaagctcccatcacaggttacatgtttgggaaaggaatctactttgctgacatgtcttccaagagtgccaattactgctttgcctctcgcctaaagaatacaggactgctgctcttatcagaggtagctctaggtcagtgtaatgaactactagaggccaatcctaaggccgaaggattgcttcaaggtaaacatagcaccaaggggctgggcaagatggctcccagttctgcccacttcgtcaccctgaatgggagtacagtgccattaggaccagcaagtgacacaggaattctgaatccagatggttataccctcaactacaatgaatatattgtatataaccccaaccaggtccgtatgcggtaccttttaaaggttcagtttaatttccttcagctgtggtgaatgttgatcttaaataaaccagagatctgatcttcaagcaagaaaataagcagtgttgtacttgtgaattttgtgatattttatg

SEQ ID NO: 286 - DNA, 875 bp, Homo sapiens
  misc_feature (1)..(875): n is a, c, g, or t
aggatcgcatcaccatcaccatcacggatcctatttaggtgacactatagaatcgtcgacccacgcgtccgccatcctcctgcggcagatgttcgagcctgtgagctgcaccttcacgtacctgctgggtgacagagagtcccgggaggccgttctgatcgacccagtcctggaaacagcgcctcgggatgcccagctgatcaaggagctggggctgcggctgctctatgctgtgaatacccactgccacgcggaccacattacaggctcggggctgctccgttccctcctccctggctgccagtctgtcatctcccgccttagtggggcccaggctgacttacacattgaggatggagactccatccgcttcgggcgcttcgcgttggagaccagggccagccctggccacaccccaggctgtgtcaccttcgtcctgaatgaccgcagcatggccttcactggagatgccctgttgatccgtgggtgtgggcggacagacttccagcaaggctgtgccaagaccttgtaccactcggtccatgaaaagatcttcacacttccaggagactgtctgatctaccctgctcacgattaccatgggttcacagtgtccaccgtggaggaggagaggactctgaaccctcggctcaccctcagctgtgaggagtttgtcaaaatcatgggcaacctgaacttgcctaaacctcagcagatagactttgctgttccagccaacatgcgctgtggggtgcagacacccactgcctgatctcacttctgtcagatgctcccatccactattaatgcactaggtgggaggagagggcggcaatgacactgcacctctcctttcccaccgcattccctgagct

SEQ ID NO: 287 - DNA, 1053 bp, Homo sapiens
  misc_feature (1)..(1053): n is a, c, g, or t
nattagagagattactatgagaggatcgcatcaccatcaccatcacggatcctatttaggtgacactatagaatcgtcgacccacgcgtccgcccacgcgtccgcggacgcgtgggtgcagccctccagccttctgccgctcgccctctgcctgctggctgcacccgcctccgcgctcgtcaggatcccgctgcacaagttcacgtccatccgccggaccatgtcggaggttgggggctctgtggaggacctgattgccaaaggccccgtctcaaagtactcccaggcggtgccagccgtgaccgaggggcccattcccgaggtgctcaagaactacatggacgcccagtactacggggagattggcatcgggacgcccccccagtgcttcacagtcgtcttcgacacgggctcctccaacctgtgggtcccctccatccactgcaaactgctggacatcgcttgctggatccaccacaagtacaacagcgacaagtccagcacctacgtgaagaatggtacctcgtttgacatccactatggctcgggcagcctctccgggtacctgagccaggacactgtgtcggtgccctgccagtcagcgtcgtcagcctctgccctgggcggtgtcaaagtggagaggcaggtctttggggaggccaccaagcagccaggcatcaccttcatcgcagccaagttcgatggcatcctgggcatggcctacccccgcatctccgtcaacaacgtgctgcccgtcttcgacaacctgatgcancanaagctggtggaccanaacatcttctccttctacctgagcagggacccanatgcgcancctgggggtganctgatgctgggtggcacanantccaagtattacaagggttctctgtcctacctgaatgtcacccgcaaggcctantggnaaggtccacctggaccangtggnaggtggccannggggntgacctgtgnaaggagggttntgaggccattgnggaaaanangnactttccntnatggtggncccngtggnanaaagnggnnnaannt

SEQ ID NO: 288 - DNA, 647 bp, Homo sapiens
  misc_feature (1)..(647): n is a, c, g, or t
nnaaagatagagagatactatgagaggatgcatcccatcaccatcacggatcctatttaggtgacactatagaatcgtcgactctggaccttggctgtcactcagttttgaagagcgccgtggaggatgaggggctcaagggcaagatcagcgaggcggacaagaagaaggtgctggacaagtgtcaagaggtcatctcgtggctggacgccaacaccttggccgagaaggacgagtttgagcacaagaggaaggagctggagcaggtgtgtaaccccatcatcagcggactgtaccagggtgccggtggtcccgggcctgggggcttcggggctcagggtcccaagggagggtctgggtcaggccccaccattgaggaggtagattaggggcctttccaagattgctgtttttgttttggagcttcaagactttgcatttcctagtatttctgtttgtcagttctcaatttcctgtgtttgcaatgttgaaattttttggtgaagtactgaacttgctttttttccggtttctacatgcagagatgaatttatactgccatcttacgactatttcttctttttaatacacttaactcaggccattttttaagttggttacttcaaagtaaataaactttaaaattc

SEQ ID NO: 289 - DNA, 903 bp, Homo sapiens
  misc_feature (1)..(903): n is a, c, g, or t
cantagagagaattactatgagaggatcgcatcaccatcaccatcacggatcctatttaggtgacactatagaatcgtcgacccacgcgtccgggaacttgcaccgaagcatcactcgagaccccaaacctccaggcctgaggcccagccagcgcccaatggatgacaaaaagaagaaacggagtcccaagccctgcctggcccagccagcccaggccccaggcacactacggagggtccctgtgcctaccagccacagcggctccttggccctaggacttcctcatctgccatcccccaagcagcgggccaagttcaagagagtaggcaaagagaagtgccgcccagtcctggctggaggtggaagcggctctgcaggcacgcccctgcagcactccttcctgaccgaggtgactgatgtctatgagatggaggggggactcctgaacctgctcaatgatttccactctggccggctgcaggccttcgggaaggaatgctcctttgagcagctggagcacgttcgggagatgcaggagaagctagcccggctgcacttcagcctggatgtgtgtggggaggaggaggacgatgaagaggaagaggatggggtcactgaggggctgccagaggagcagaagaagacaatggctgaccgtaacctggaccagctgcttagcaatctggaagacctcagtaattctatccagaagctgcacctggccgagaacgccgagcctgaggagcagtccgctgcgtaggcgtcccacgcaggcccacactgcccctctcattctcttcaaactgtgacttttttanagactcgggcgggtgttctgcggncccccaggtgctatgggggaaggggggcgttgaatggaattaaaaccanaaaagaaaagc

SEQ ID NO: 290 - DNA, 1138 bp, Homo sapiens
  misc_feature (1)..(1138): n is a, c, g, or t
tagagaaattactatggagaggatcgcatcaccatcaccatcacgggatcctatttaggtgacactatagaatcgtcgacccacgcgtccgtgaagcgtcaaggctatgatgcggcgtgtgacatctggagtttggggatcctgttgtacaccatgctggcaggatttaccccttttgcaaatgggccagacgatacccctgaggagattctggcgcggatcggcagtgggaagtatgccctttctgggggaaactgggactcgatatctgacgcagctaaagacgtcgtgtccaagatgctccacgtggaccctcatcagcgcctgacggcgatgcaagtgctcaaacacccgtgggtggtcaacagagagtacctgtccccaaaccagctcagccgacaggacgtgcacctggtgaagggcgcgatggccgccacctactttgctctaaacagaacacctcaggccccgcggctggagcccgtgctgtcgtccaacctggctcagcgcagaggcatgaagagactcacgtccacgcggttgtagcgggtgggaccctggccccagcgtcccctgccagcatcctcgtgggctcacagaccccggcctcggagcccgtctggcacccagagtgaccacaagtccagcagggaggcggcgcccgccctcgccgtgtccgtgttttctttttcagccccggagagggtcctgacctgggggcttctccaagcctcactgcgccagcctccccgcccgctctcttttctcccaagcaaaaccaaatgcgccccttcacctcgcgtgcccgtgcgaggccgggggcttctttcanagcccgcgggtcctctcatacatggcttctgntttctgccnaaanatctgttttccaattatgaanccggtcggtttggtcaaactcccganacccacntcccangtacccggtggnaaantggcantgcnanggcncanccnttggttggttgcaggncccnaaangctggggtgacctggcatcccgggnctcccncggctganganngggttggcactnnggcntccanaagaaatgcctgnttntncccaaaaaatcnaaaaaccntttccccnccccttnanttttgccgnngggnnggga

SEQ ID NO: 291 - DNA, 1314 bp, Homo sapiens
  misc_feature (1)..(1314): n is a, c, g, or t
tagagaaaattactatgagaggatcgcatcaccatcaccatcacggatcctatttaggtgacactatagaatcgtcgacccacgcgtccgcggcgggcggcgggcgggccgagggcagcgcgggcgggcctcgtcctcgccctcctgccctgggtgcggccccccgggtcccggcgcccactgccccggcgtcccgcgctccgcgcccgcccaggcacccaccagcggcgccgacctcagcgcgcacctatgggctcgctaccaggacatgcggagactggtgcacgacctcctgccccccgaggtctgcagtctcctgaacccagcagccatctacgccaacaacgagatcagcctgcgtgacgttgaggtctacggctttgactacgactacaccctggcccagtatgcagacgcactgcaccccgagatcttcagtaccgcccgtgacatcctgatcgagcactacaagtacccagaagggattcggaagtatgactacaaccccagctttgccatccgtggcctccactatgacattcagaagagccttctgatgaagattgacgccttccactacgtgcagctggggacagcctacaggggcctccagcctgtgccagacgaggaggtgattgagctgtatgggggtacccagcacatcccactataccagatgagtggcttctatggcaagggtccctccattaagcagttcatggacatcttctcgctaccggagatggctctgctgtcctgtgtggtggactactttctgggccacagcctggagtttgaccaagcacatctctacaaggacgtgacggacgccatccgagacgtgcatgtgaagggcctcatgtaccagtggatcgagcaggacatgganaantacatcntganaggggatgaaacgtttgctgtcctganccgcctggtggcccatgggaaaanagctgttcctcatcancaaaaagtcnttttanctttcgtaaanaaggggaatgcgggaaatggtgggttccgatttggncccagctnttncaatgtggtcattgtcaaggcaaaaaancccanntttntttcattgacgggggaagcnttttaaaaaattnaataaaaagggttcnttttnntgggaacggnatnnccccttggaaaangggaaaanttnttgnnagggaaaactgttttaatttnttnactttgaagaaaagggggggncccccggntttttttttgggaaaaccntttttattanttggggnanttttttttnggaaggnngggaaaagncctttnccnnannggngg

SEQ ID NO: 292 - DNA, 1099 bp, Homo sapiens
  misc_feature (1)..(1099): n is a, c, g, or t
antagagaaattactatgagaggatcgcatcaccatcaccatcacggatcctatttaggtgacactatagaatcgtcgacccacgcgtccggccgccctcgccatggccgcgccggccccgggcctcatctcggtgttctcgagttcccaggagctgggtgcggcgctagcgcagctggtggcccagcgcgcagcatgctgcctggcaggggcccgcgcccgtttcgcgctcggcttgtcgggcgggagcctcgtctcgatgctagcccgcgagctacccgccgccgtcgcccctgccgggccagctagcttagcgcgctggacgctgggcttctgcgacgagcgcctcgtgcccttcgatcacgccgagagcacgtacggcctctaccggacgcatcttctctccagactgccgatcccagaaagccaggtgatcaccattaaccccgagctgcctgtggaggaggcggctgaggactacgccaagaagctgagacaggcattccaaggggactccatcccggttttcgacctgctgatcctgggggtgggccccgatggtcacacctgctcactcttcccagaccaccccctcctacaggagcgggagaagattgtggctcccatcagtgactccccgaagccaccgccacagcgtgtgaccctcacgctacctgtcctgaatgcagcacgaactgtcatctttgtggcaactggagaaggcaaggcagctgttctgaagcgcattttggaggaccaggangaaaacccgctgcccgccgccctggtccagccccacaccgggaaactgtgctggttcttggacnangcggccgctccctatagtgagtcgtattaancttaattaactgancttggactcctgttgataaatccagtaatgacctcaaaactccatctggatttgttcaaaaacgctcggnttgccnccgggcgtttttttattggtganaatccaagctancttggcganatttttnngaanctnanggaanctaaaaatggaaaaaaaaaantccctggaaaaaaccaccngttnaaaanatccnaanggnatcntaaaaaaaattttgaagnn

SEQ ID NO: 293 - DNA, 944 bp, Homo sapiens
  misc_feature (1)..(944): n is a, c, g, or t
naattagagaaattactatgagaggatcgcatcaccatcaccatcacggatcctatttaggtgacactatagaatcgtcgacccacgcgtccgcgctgttgcggcagctggagacgaaccagctggacatggacgccacgctggaggagctgtcggtgcagcaggagacggaggaccagaactacggcatcttcctggagatgatggaggctcgcagccgtggccatgcgtccccactggcggccaacgggcagagcccatccccgggctcccagtcaccagtggtgcctgcaggcgctgtgtccacggggagctccagccccggcacaccccagcccgccccacagctgcccctcaatgctgccccaccatcctctgtgccccctgtaccaccctcagaggccctgcccccacctgcgtgcccctcagcccccgccccacggcgcagcatcatctctaggctgtttgggacgtcacctgccaccgaggcagcccctccacctccagagccagtcccggccgcacagggcccagcaacggtccagagtgtggaggactttgttcctgacgaccgcctggaccgcagcttcctggaagacacaacccccgccagggacganaagaaggtgggggccaaggctgcccancaggacagcgacagtgatggggangccctgggcggcaacccgatggtggcagggttccaggacgatgtggacctcnaaaaccanccacgtggnantcccccgctgccttgcaggccccgtcccaattcaananatcantcttttcnagtgaggangaaacaaaaantggcanctcccanaaaaggcctngccccaactccccaanantgctnaaaanccaaaaancaantggtcctccatacnactttcaaancnangaagggggaaaannntcccanaannaacnnaanaccccct

SEQ ID NO: 294 - DNA, 747 bp, Homo sapiens
atggctgagctggatccgttcggcgcccctgccggcgcccctggcggtcccgcgctggggaacggagtggccggcgccggcgaagaagacccggctgcggccttcttggcgcagcaagagagcgagattgcgggcatcgagaacgacgaggccttcgccatcctggacggcggcgcccccgggccccagccgcacggcgagccgccggggggtccggatgctgttgatggagtaatgaatggtgaatactaccaggaaagtaatggtccaacagacagttatgcagctatttcacaagtggatcgattgcagtcagagcctgaaagtatccgtaaatggagagaagaacaaatggaacgcttggaagcccttgatgccaattctcggaagcaagaagcagagtggaaagaaaaggcaataaaggagctagaagaatggtatgcaagacaggacgagcagctacagaaaacaaaagcaaacaacagggtggcagatgaagctttctacaaacaacccttcgctgacgtgattggttatgtcacaaacataaaccatccttgctacagcctagaacaggcagcagaagaagcctttgtaaatgacattgacgagtcgtccccaggcactgagtgggaacgggtggcccggctgtgtgactttaaccccaagtctagcaagcaggccaaagatgtctcccgcatgcgctcagtcctcatctccctcaagcaggccccgctggtgcactga

SEQ ID NO: 295 - DNA, 3456 bp, Homo sapiens
atgctgaggagagtcactgttgctgcagtctgtgccacccggaggaagttgtgtgaggccgggcgggagctcgcggcgctctggggaatcgaaacgcggggtcggtgcgaagactctgctgctgccagaccctttcctattctggccatgcctggaaggaacaaggcgaagtctacctgcagctgccctgacctgcagcccaatggacaggatctgggcgagaacagccgggttgcccgtctaggagcggatgaatctgaggaagagggacggagggggtctctcagtaatgctggggaccctgagatcgtcaagtctcccagcgaccccaagcaataccgatacatcaaattacagaatggcttgcaggcacttctgatttcagacctaagtaatatggaaggtaaaacaggaaatacaacagatgatgaagaagaagaggaggtggaggaagaagaagaagatgatgatgaagattctggagctgaaatagaagatgacgatgaagagggttttgatgatgaagatgagtttgatgatgaacatgatgatgatcttgatactgaggataatgaattggaagaattagaagagagagcagaagctagaaaaaaaactactgaaaaacagtctgcagcggctctttgtgttggagttgggagtttcgctgatccagatgacctgccggggctggcacactttttggagcacatggtattcatgggtagtttgaaatatccagatgagaatggatttgatgccttcctgaagaagcatgggggtagtgataatgcctcaactgattgtgaacgcactgtctttcagtttgatgtccagaggaagtacttcaaggaagctcttgatagatgggcgcagttcttcatccacccactaatgatcagagatgcaattgaccgtgaagttgaagctgttgatagtgaatatcaacttgcaaggccttctgatgcaaacagaaaggaaatgttgtttggaagccttgctagacctggacatcctatgggaaaatttttttggggaaatgctgagacgctcaagcatgagccaagaaagaataatattgatacacatgctagattgagagaattctggatgcgttactactcttctcattacatgactttagtggttcaatccaaagaaacactggatactttggaaaagtgggtgactgaaatcttctctcagataccaaacaatgggttacccagaccaaactttggccatttaacggatccatttgacacaccagcatttaacaaactttatagagttgttccaatcagaaaaattcatgctctgaccatcacatgggcacttcctcctcaacagcaacattacagggtgaagccacttcattatatatcctggctggttggacatgaaggcaaaggcagcattctttctttccttaggaaaaaatgctgggctcttgcactgtttggtggaaatggtgagacaggatttgagcaaaattctacttattcagtgttcagcatttctattacattgactgatgagggttatgaacatttttatgaggttgcttacactgtctttcagtatttaaaaatgctgcagaagctaggcccagaaaaaagaatttttgaagagattcggaaaattgaggataatgaatttcattaccaagaacagacagatccagttgagtatgtggaaaacatgtgtgagaacatgcagctgtacccattgcaggacattctcactggagatcagcttctttttgaatacaagccagaagtcattggtgaagccttgaatcagctagttcctcaaaaagcaaatcttgttttactgtctggtgctaatgagggaaaatgtgacctcaaggagaaatggtttggaactcaatatagtatagaagatattgaaaactcttgggctgaactgtggaatagtaatttcgaattaaatccagatcttcatcttccagctgaaaacaagtacatagccacggactttacgttgaaggctttcgattgcccggaaacagaatacccagttaaaattgtgaatactccacaaggttgcctgtggtataagaaagacaacaaattcaaaatccccaaagcatatatacgtttccatctaatttcaccgttgatacagaaatctgcagcaaatgtggtcctctttgatatctttgtcaatatccttacgcataaccttgcggaaccagcttatgaagcagatgtggcacagctggagtataaactggtagctggagaacatggtttaattattcgagtgaaaggatttaaccacaaactacctctactgtttcagctcattattgactacttagctgagttcaattccacaccagctgtctttacaatgataactgagcagttgaagaagacctactttaacatcctcatcaagcccgagactttggccaaagatgtacggcttttaatcttggaatatgcccgttggtctatgattgacaagtaccaggctttgatggacggcctttcccttgagtctctgctgagcttcgtcaaagaattcaaatcccagctctttgtggagggcctggtacaagggaatgtcacaagcacagaatctatggatttcctgaaatatgttgttgacaaactaaacttcaagcctctggagcaggagatgcctgtgcagttccaggtggtagagctgcccagtggccaccatctatgcaaagtgaaagctctgaacaagggtgatgccaactctgaagtcactgtgtactaccagtcaggtaccaggagtctaagagaatatacgcttatggagctgcttgtgatgcacatggaagaaccttgttttgacttccttcgaaccaagcagacccttgggtaccatgtctaccctacctgtaggaacacatccgggattctaggattttctgtcactgtggggactcaggcaaccaaatacaattctgaagttgttgataagaagatagaagagtttctttctagctttgaggagaagattgagaacctcactgaagaggcattcaacacccaggtcacagctctcatcaagctgaaggagtgtgaggatacccaccttggggaggaggtggataggaactggaatgaagtggttacacagcagtacctctttgaccgccttgcccacgagattgaagcactgaagtcattctcaaaatcagacctggtcaactggttcaaggcccatagagggccaggaagtaaaatgctcagcgttcatgttgttggatatgggaagtatgaactggaagaggatggtaccccttctagtgaggattcaaattcttcttgtgaagtgatgcagctgacctacctgccaacctctcctctgctggcagattgtatcatccccattactgatatcagggctttcacaacaacactcaaccttctcccctaccataaaatagtcaaataa

SEQ ID NO: 296 - DNA, 1515 bp, Homo sapiens
atgggcggggcaggcgcgcggggattggcgggatgcggcgcgccgcgcgtgaacctccttggcctgggcgaagctgtgtggaccaagcaagtcaggagtgtggccatgttttctgagcaggctgcccagagggcccacactctactgtccccaccatcagccaacaatgccacctttgcccgggtgccagtggcaacctacaccaactcctcacaacccttccggctaggagagcgcagctttagccggcagtatgcccacatttatgccacccgcctcatccaaatgagacccttcctggagaaccgggcccagcagcactggggcagtggagtgggagtgaagaagctgtgtgaactgcagcctgaggagaagtgctgtgtggtgggcactctgttcaaggccatgccgctgcagccctccatcctgcgggaggtcagcgaggagcacaacctgctcccccagcctcctcggagtaaatacatacacccagatgacgagctggtcttggaagatgaactgcagcgtatcaaactaaaaggcaccattgacgtgtcaaagctggttacggggactgtcctggctgtgtttggctccgtgagagacgacgggaagtttctggtggaggactattgctttgctgaccttgctccccagaagcccgcacccccacttgacacagataggtttgtgctactggtgtccggcctgggcctgggtggcggtggaggcgagagcctgctgggcacccagctgctggtggatgtggtgacggggcagcttggggacgaaggggagcagtgcagcgccgcccacgtctcccgggttatcctcgctggcaacctcctcagccacagcacccagagcagggattctatcaataaggccaaatacctcaccaagaaaacccaggcagccagcgtggaggctgttaagatgctggatgagatcctcctgcagctgagcgcctcagtgcccgtggacgtgatgccaggcgagtttgatcccaccaattacacgctcccccagcagcccctccacccctgcatgttcccgctggccactgcctactccacgctccagctggtcaccaacccctaccaggccaccattgatggagtcagatttttggggacatcaggacagaacgtgagtgacattttccgatacagcagcatggaggatcacttggagatcctggagtggaccctgcgggtccgtcacatcagccccacagcccctgacactctaggttgttaccccttctacaaaactgacccgttcatcttcccagagtgcccgcatgtctacttttgtggcaacacccccagctttggctccaaaatcatccgaggtcctgaggaccagacagtgctgttggtgactgtccctgacttcagtgccacgcagaccgcctgccttgtgaacctgcgcagcctggcctgccagcccatcagcttctcgggcttcggggcagaggacgatgacctgggaggcctggggctgggcccctga

SEQ ID NO: 297 - DNA, 699 bp, Homo sapiens
atgaaggagagacgggccccccagccagtcgtggccagatgtaagctcgttctggtcggggacgtgcagtgtgggaagaccgcgatgttgcaagtgttagcgaaggattgctatccagagacctatgtgcccaccgtgttcgaaaattacacagcctgtttggagacagaggaacagagggtggagcttagtctctgggatacctcaggatctccctactacgataatgtccgtccactctgctacagcgactcggatgcagtattactatgttttgacatcagccgtccagagacagtggacagcgcactcaagaagtggaggacagaaatcctagattattgtcccagcacccgcgttttgctcattggctgcaagacagacctgcgaacagacctgagtactctgatggagctgtcccaccagaagcaggcgcccatctcctatgagcagggttgtgcaatagcaaagcagctgggtgcagaaatctacctggaaggctcagctttcacctcagaaaagagcatccacagcatctttcggacggcatccatgctgtgtctgaacaagcctagcccactgccccagaagagccctgtccgaagcctctccaaacgactgctccacctccccagtcgctctgaactcatctcttctaccttcaagaaggaaaaggccaaaagctgttccattatgtga

SEQ ID NO: 298 - DNA, 1215 bp, Homo sapiens
atggaccaggactatgagcggcgcctgcttcgccagatcgtcatccagaatgagaacacgatgccacgcgtcacagagatgcggcggaccctgacgcctgccagctccccagtgtcctcgcccagcaagcacggagaccgcttcatcccctccagagccggagccaactggagcgtgaacttccacaggattaacgagaatgagaagtctcccagtcagaaccggaaagccaaggacgccacctcagacaacggcaaagacggcctggcctactctgccctgctcaagaatgagctgctgggtgccggcatcgagaaggtgcaggacccgcagactgaggaccgcaggctgcagccctccacgcctgagaagaagggtctgttcacggtgacgcggctctgtgacctctcagtggaaggggactcagtgacctccgtgggctggtctgagcgggggaacctggtggcggtgggcacacacaagggcttcgtgcagatctgggacgcagccgcagggaagaagctgtccatgttggagggccacacggcacgcgtcggggcgctggcctggaatgctgagcagctgtcgtccgggagccgcgaccgcatgatcctgcagagggacatccgcaccccgccactgcagtcggagcggcggctgcagggccaccggcaggaggtgtgcgggctcaagtggtccacagaccaccagctcctcgcctcggggggcaacgacaacaagctgctggtctggaatcactcgagcctgagccccgtgcagcagtacacggagcacctggcggccgtgaaggccatcgcctggtccccacatcagcacgggctgctggcctcggggggcggcacagctgaccgctgtatccgcttctggaacacgctgacaggacaaccactgcagtgtatcgacacgggctcccaagtgtgcaatctggcctggtccaagcacgccaacgagctggtgagcacgcacggctactcacagaaccagatccttgtctggaagtacccctccctgacccaggtggccaagctgaccgggcactcctaccgcgtgctgtacctggcaatgtcccctgatggggaggccatcgtcactggtgctggagacgagaccctgaggttctggaacgtctttagcaaaacccgttcgacaaaggagtctgtgtctgtgctcaacctcttcaccaggatccggtaa

SEQ ID NO: 299 - DNA, 1353 bp, Homo sapiens
atgagggagatcgtgcacatccaggccggccagtgcggcaaccagatcggggccaagttctgggaagtcatcagtgatgagcatggcatcgaccccagcggcaactacgtgggcgactcggacttgcagctggagcggatcagcgtctactacaacgaggcctcttctcacaagtacgtgcctcgagccattctggtggacctggaacccggaaccatggacagtgtccgctcaggggcctttggacatctcttcaggcctgacaatttcatctttggtcagagtggggccggcaacaactgggccaagggtcactacacggagggggcggagctggtggattcggtcctggatgtggtgcggaaggagtgtgaaaactgcgactgcctgcagggcttccagctgacccactcgctggggggcggcacgggctccggcatgggcacgttgctcatcagcaaggtgcgtgaggagtatcccgaccgcatcatgaacaccttcagcgtcgtgccctcacccaaggtgtcagacacggtggtggagccctacaacgccacgctgtccatccaccagctggtggagaacacggatgagacctactgcatcgacaacgaggcgctctacgacatctgcttccgcaccctcaagctggccacgcccacctacggggacctcaaccacctggtatcggccaccatgagcggagtcaccacctccttgcgcttcccgggccagctcaacgctgacctgcgcaagctggccgtcaacatggtgcccttcccgcgcctgcacttcttcatgcccggcttcgcccccctcacagcccggggcagccagcagtaccgggccctgaccgtgcccgagctcacccagcagatgttcgatgccaagaacatgatggccgcctgcgacccgcgccacggccgctacctgacggtggccaccgtgttccggggccgcatgtccatgaaggaggtggacgagcagatgctggccatccagagcaagaacagcagctacttcgtggagtggatccccaacaacgtgaaggtggccgtgtgtgacatcccgccccgcggcctcaagatgtcctccaccttcatcgggaacagcacggccatccaggagctgttcaagcgcatctccgagcagttcacggccatgttccggcgcaaggccttcctgcactggtacacgggcgagggcatggacgagatggagttcaccgaggccgagagcaacatgaacgacctggtgtccgagtaccagcagtaccaggacgccacggccgaggaagagggcgagatgtacgaagacgacgaggaggagtcggaggcccagggccccaagtga

SEQ ID NO: 300 - DNA, 2892 bp, Homo sapiens
atggcggacctggccgagtgcaacatcaaagtgatgtgtcgcttcagacctctcaacgagtctgaagtgaaccgcggcgacaagtacatcgccaagtttcagggagaagacacggtcgtgatcgcgtccaagccttatgcatttgatcgggtgttccagtcaagcacatctcaagagcaagtgtataatgactgtgcaaagaagattgttaaagatgtacttgaaggatataatggaacaatatttgcatatggacaaacatcctctgggaagacacacacaatggagggtaaacttcatgatccagaaggcatgggaattattccaagaatagtgcaagatatttttaattatatttactccatggatgaaaatttggaatttcatattaaggtttcatattttgaaatatatttggataagataagggacctgttagatgtttcaaagaccaacctttcagttcatgaagacaaaaaccgagttccctatgtaaaggggtgcacagagcgttttgtatgtagtccagatgaagttatggataccatagatgaaggaaaatccaacagacatgtagcagttacaaatatgaatgaacatagctctaggagtcacagtatatttcttattaatgtcaaacaagagaacacacaaacggaacaaaagctgagtggaaaactttatctggttgatttagctggtagtgaaaaggttagtaaaactggagctgaaggtgctgtgctggatgaagctaaaaacatcaacaagtcactttctgctcttggaaatgttatttctgctttggctgagggtagtacatatgttccatatcgagatagtaaaatgacaagaatccttcaagattcattaggtggcaactgtagaaccactattgtaatttgctgctctccatcatcatacaatgagtctgaaacaaaatctacactcttatttggccaaagggccaaaacaattaagaacacagtttgtgtcaatgtggagttaactgcagaacagtggaaaaagaagtatgaaaaagaaaaagaaaaaaataagatcctgcggaacactattcagtggcttgaaaatgagctcaacagatggcgtaatggggagacggtgcctattgatgaacagtttgacaaagagaaagccaacttggaagctttcacagtggataaagatattactcttaccaatgataaaccagcaaccgcaattggagttataggaaattttactgatgctgaaagaagaaagtgtgaagaagaaattgctaaattatacaaacagcttgatgacaaggatgaagaaattaaccagcaaagtcaactggtagagaaactgaagacgcaaatgttggatcaggaggagcttttggcatctaccagaagggatcaagacaatatgcaagctgagctgaatcgccttcaagcagaaaatgatgcctctaaagaagaagtgaaagaagttttacaggccctagaagaacttgctgtcaattatgatcagaagtctcaggaagttgaagacaaaactaaggaatatgaattgcttagtgatgaattgaatcagaaatcggcaactttagcgagtatagatgctgagcttcagaaacttaaggaaatgaccaaccaccagaaaaaacgagcagctgagatgatggcatctttactaaaagaccttgcagaaataggaattgctgtgggaaataatgatgtaaagcagcctgagggaactggcatgatagatgaagagttcactgttgcaagactctacattagcaaaatgaagtcagaagtaaaaaccatggtgaaacgttgcaagcagttagaaagcacacaaactgagagcaacaaaaaaatggaagaaaatgaaaaggagttagcagcatgtcagcttcgtatctctcaacatgaagccaaaatcaagtcattgactgaataccttcaaaatgtggaacaaaagaaaagacagttggaggaatctgtcgatgccctcagtgaagaactagtccagcttcgagcacaagagaaagtccatgaaatggaaaaggagcacttaaataaggttcagactgcaaatgaagttaagcaagctgttgaacagcagatccagagccatagagaaactcatcaaaaacagatcagtagtttgagagatgaagtagaagcaaaagcaaaacttattactgatcttcaagaccaaaaccagaaaatgatgttagagcaggaacgtctaagagtagaacatgagaagttgaaagccacagatcaggaaaagagcagaaaactacatgaacttacggttatgcaagatagacgagaacaagcaagacaagacttgaagggtttggaagagacagtggcaaaagaacttcagactttacacaacctgcgcaaactctttgttcaggacctggctacaagagttaaaaagagtgctgagattgattctgatgacaccggaggcagcgctgctcagaagcaaaaaatctcctttcttgaaaataatcttgaacagctcactaaagtgcacaaacagttggtacgtgataatgcagatctccgctgtgaacttcctaagttggaaaagcgacttcgagctacagctgagagagtgaaagctttggaatcagcactgaaagaagctaaagaaaatgcatctcgtgatcgcaaacgctatcagcaagaagtagatcgcataaaggaagcagtcaggtcaaagaatatggccagaagagggcattctgcacagattgctaaacctattcgtcccgggcaacatccagcagcttctccaactcacccaagtgcaattcgtggaggaggtgcatttgttcagaacagccagccagtggcagtgcgaggtggaggaggcaaacaagtgtaa

SEQ ID NO: 301 - DNA, 1146 bp, Homo sapiens
atgcccttctccaacagccacaacgcactgaagctgcgcttcccggccgaggacgagttccccgacctgagcgcccacaacaaccacatggccaaggtgctgacccccgagctgtacgcggagctgcgcgccaagagcacgccgagcggcttcacgctggacgacgtcatccagacaggcgtggacaacccgggccacccgtacatcatgaccgtgggctgcgtggcgggcgacgaggagtcctacgaagtgttcaaggatctcttcgaccccatcatcgaggaccggcacggcggctacaagcccagcgatgagcacaagaccgacctcaaccccgacaacctgcagggcggcgacgacctggaccccaactacgtgctgagctcgcgggtgcgcacgggccgcagcatccgtggcttctgcctccccccgcactgcagccgcggggagcgccgcgccatcgagaagctcgcggtggaagccctgtccagcctggacggcgacctggcgggccgatactacgcgctcaagagcatgacggaggcggagcagcagcagctcatcgacgaccacttcctcttcgacaagcccgtgtcgcccctgctgctggcctcgggcatggcccgcgactggcccgacgcccgcggtatctggcacaatgacaataagaccttcctggtgtgggtcaacgaggaggaccacctgcgggtcatctccatgcagaaggggggcaacatgaaggaggtgttcacccgcttctgcaccggcctcacccagattgaaactctcttcaagtctaaggactatgagttcatgtggaaccctcacctgggctacatcctcacctgcccatccaacctgggcaccgggctgcgggcaggtgtgcatatcaagctgcccaacctgggcaagcatgagaagttctcggaggtgcttaagcggctgcgacttcagaagcgaggcacaggcggtgtggacacggctgcggtgggcggggtcttcgacgtctccaacgctgaccgcctgggcttctcagaggtggagctggtgcagatggtggtggacggagtgaagctgctcatcgagatggagcagcggctggagcagggccaggccatcgacgacctcatgcctgcccagaaatga

SEQ ID NO: 302 - DNA, 2286 bp, Homo sapiens
atggattcaggcggtggaagtcttggattgcacacgccagactctagaatggcccataccatgattatgcaagattttgtggctggaatggctggtactgcacatatcgatggagaccatattgttgtttcagttcctgaagctgttttagtttctgatgttgtcacagatgatgggataactcttgatcatggccttgcagctgaagttgtccatggacctgatatcatcacagagactgatgtagtaacagaaggtgtgattgttcctgaagcggtacttgaagctgatgttgccattgaagaggatttagaggaagatgatggtgatcacatcttgacttctgaactaattacagaaaccgttagggtaccagagcaggttttcgtggctgaccttgttactggtcctaatggacacttagaacatgtggtccaagattgtgtttcaggagtcgactctcccacaatggtatcagaggaggttcttgtaactaattcagatacagaaactgtgattcaagcagctggaggtgttcctggttctacagttactataaaaaccgaagatgatgatgatgatgatgtcaagagcacttctgaagactacttaatgatatctttggatgatgttggagaaaaattagagcatatggggaatacaccattaaaaattggcagtgatggttcacaagaagatgctaaagaagatgggtttggttctgaagttataaaagtgtatatatttaaagcggaggctgaagatgatgttgaaataggtggaacagaaattgtcacagagagtgagtacaccagtggacattcagtagctggagtgcttgaccagagccgaatgcagcgggagaagatggtttacatggcagttaaagattcttctcaagaagaagatgatatcagagatgaaagaagagtttcccgaaggtatgaagattgtcaagcatcaggaaatactttggactcagcattagaaagcagaagtagtacagcagcacagtaccttcaaatttgtgacggcattaatacaaataaagtacttaaacaaaaagccaaaaagaggagaaggggagaaaccaggcagtggcaaacagctgttataataggtcctgatggacagcccctcacagtgtacccttgccatatttgcacaaaaaagtttaaatccaggggattcttaaaaagacacatgaagaatcatcctgatcatttaatgagaaaaaaatatcagtgtacagattgtgactttacaactaacaagaaagtgagtttccataaccacttagaaagccataagctcataaacaaagtcgacaaaacccatgaatttacagaatacacacgaagatacagagaggctagtccactgagttccaataaacttattttaagagacaaggagccgaagatgcacaagtgcaaatactgtgactatgaaactgcagaacaaggactgttaaacaggcatttgttggccgttcacagcaagaattttcctcatgtttgtgttgagtgtgggaagggttttcgacatccttctgaactcaagaaacatatgagaacccatactggtgagaagccatatcagtgtcagtattgtattttcaggtgtgcagatcaatcaaatctgaaaactcacattaagtctaaacatggtaacaatttgccatataaatgtgagcattgtccccaagcatttggtgatgagagggagcttcaacgccatctggatttgtttcaaggacataagacacaccagtgtcctcattgtgaccataagagcaccaattcaagtgaccttaagcggcacatcatatctgtccatactaaggattttcctcacaaatgtgaggtctgtgataaaggttttcatcgtccttctgagctcaaaaagcatagtgatatccataagggtaggaagattcatcagtgcaggcactgtgactttaaaacatccgatccatttattcttagtggccatatcctttcagttcatactaaagatcagccattgaaatgtaaaaggtgcaagagaggattcagacaacaaaatgagctaaaaaaacatatgaagacccatactggaaggaagatttaccaatgtgagtattgtgaatacagcactacagatgcatctggctttaaacgacatgtgatatcaatacatacaaaagactatccacacaggtgtgaattctgcaagaagggattccgaagaccatcagaaaaaaatcagcatattatgaggcaccacaaagaggctcttatgtaa

SEQ ID NO: 303 - DNA, 393 bp, Homo sapiens
atggctgagtacgggaccctcctgcaagacctgaccaacaacatcacccttgaagatctagaacagctcaagtcggcctgcaaggaagacatccccagcgaaaagagtgaggagatcactactggcagtgcctggtttagcttcctggagagccacaacaagctggacaaagacaacctctcctacattgagcacatctttgagatctcccgccgtcctgacctactcactatggtggttgactacagaacccgtgtgctgaagatctctgaggaggatgagctggacaccaagctaacccgtatccccagtgccaagaagtacaaagacattatccggcagccctctgaggaagagatcatcaaattggctcccccaccgaagaaggcctga

SEQ ID NO: 304 - DNA, 5316 bp, Homo sapiens
atgtcagttttgatatcacagagcgtcataaattatgtagaggaagaaaacattcctgctctgaaagctcttcttgaaaaatgcaaagatgtagatgagagaaatgagtgtggccagactccactgatgatagctgccgaacaaggcaatctggaaatagtgaaggaattaattaagaatggagctaactgcaatctggaagatttggataattggacagcacttatatctgcatcgaaagaagggcatgtgcacatcgtagaggaactactgaaatgtggggttaacttggagcaccgtgatatgggaggatggacagctcttatgtgggcatgttacaaaggccgtactgacgtagtagagttgcttctttctcatggtgccaatccaagtgtcactggtctgtacagtgtttacccaatcatttgggcagcagggagaggccatgcagatatagttcatcttttactgcaaaatggtgctaaagtcaactgctctgataagtatggaaccacccctttagtttgggctgcacgaaagggtcatttggaatgtgtgaaacatttattggccatgggagctgatgtggatcaagaaggagctaattcaatgactgcacttattgtggcagtgaaaggaggttacacacagtcagtaaaagaaattttgaagaggaatccaaatgtaaacttaacagataaagatggaaatacagctttgatgattgcatcaaaggagggacatacggagattgtgcaggatctgctcgacgctggaacatatgtgaacatacctgacaggagtggggatactgtgttgattggcgctgtcagaggtggtcatgttgaaattgttcgagcgcttctccaaaaatatgctgatatagacattagaggacaggataataaaactgctttgtattgggctgttgagaaaggaaatgcaacaatggtgagagatatcttacagtgcaatcctgacactgaaatatgcacaaaggatggtgaaacgccacttataaaggctaccaagatgagaaacattgaagtggtggagctgctgctagataaaggtgctaaagtgtctgctgtagataagaaaggagatactcccttgcatattgctattcgtggaaggagccggaaactggcagaactgcttttaagaaatcccaaagatgggcgattactttataggcccaacaaagcaggcgagactccttataatattgactgtagccatcagaagagtattttaactcaaatatttggagccagacacttgtctcctactgaaacagacggtgacatgcttggatatgatttatatagcagtgccctggcagatattctcagtgagcctaccatgcagccacccatttgtgtggggttatatgcacagtggggaagtgggaaatctttcttactcaagaaactagaagacgaaatgaaaaccttcgccggacaacagattgagcctctctttcagttctcatggctcatagtgtttcttaccctgctactttgtggagggcttggtttattgtttgccttcacggtccacccaaatcttggaatagcagtgtcactgagcttcttggctctcttatatatattctttattgtcatttactttggtggacgaagagaaggagagagttggaattgggcctgggtcctcagcactagattggcaagacatattggatatttggaactcctccttaaattgatgtttgtgaatccacctgagttgccagagcagactactaaagctttacctgtgaggtttttgtttacagattacaatagactgtccagtgtaggtggagaaacttctctggctgaaatgattgcaaccctctcggatgcttgtgaaagagagtttggctttttggcaaccaggctttttcgagtattcaagactgaagatactcagggtaaaaagaaatggaaaaaaacatgttgtctcccatcttttgtcatcttcctttttatcattggctgcattatatctggaattactcttctggctatatttagagttgacccaaagcatctgactgtaaatgctgtcctcatatcaatcgcatctgtagtgggattggcctttgtgttgaactgtcgtacatggtggcaagtgctggactcgctcctgaattcccaaagaaaacgcctccataatgcagcctccaaactgcacaaattgaaaagtgaaggattcatgaaagttcttaaatgtgaagtggaattgatggccaggatggcaaaaaccattgacagcttcactcagaatcagacaaggctggtggtcatcatcgatggattagatgcctgtgagcaggacaaagtccttcagatgctggacactgtccgagttctgttttcaaaaggcccgttcattgccatttttgcaagtgatccacatattatcataaaggcaattaaccagaacctcaatagtgtgcttcgggattcaaatataaatggccatgactacatgcgcaacatagtccacttgcctgtgttccttaatagtcgtggactaagcaatgcaagaaaatttctcgtaacttcagcaacaaatggagacgttccatgctcagatactacagggatacaggaagatgctgacagaagagtttcacagaacagccttggggagatgacaaaacttggtagcaagacagccctcaatagacgggacacttaccgaagaaggcagatgcagaggaccatcactcgccagatgtcctttgatcttacaaaactgctggttaccgaggactggttcagtgacatcagtccccagaccatgagaagattacttaatattgtttctgtgacaggacgattactgagagccaatcagattagtttcaactgggacaggcttgctagctggatcaaccttactgagcagtggccataccggacttcatggctcatattatatttggaagagactgaaggtattccagatcaaatgacattaaaaaccatctacgaaagaatatcaaagaatattccaacaactaaggatgttgagccacttcttgaaattgatggagatataagaaattttgaagtgtttttgtcttcaaggaccccagttcttgtggctcgagatgtaaaagtctttttgccatgcactgtaaacctagatcccaaactacgggaaattattgcagatgttcgtgctgccagagagcagatcagtattggaggactggcgtaccccccgctccctctacatgagggtcctcctagggcgccatcagggtacagccagcccccatccgtgtgctcttccacgtccttcaatgggcccttcgcaggtggagtggtgtcaccacagcctcacagcagctattacagcggcatgacgggccctcagcatcccttctacaacaggccattctttgccccatacctttacacgccaaggtattaccctggcggctcccaacatctcatctcacgtccatcagtaaaaacgagtttgcccagagatcagaacaatggcctagaagttatcaaggaggatgctgctgaggggctttcttcacccacagactcctcgagggggtcaggcccagccccaggcccagtggtattactgaattcactgaatgtggatgcagtatgtgagaagctgaaacaaatagaagggctggaccagagtatgctgcctcagtattgtaccacgatcaaaaaggcaaacataaatggccgtgtgttagctcagtgtaacattgatgagctgaagaaagagatgaatatgaattttggagactggcaccttttcagaagcacagtactagaaatgagaaacgcagaaagccacgtggtccctgaagacccacgtttcctcagtgagagcagcagtggcccagccccgcacggtgagcctgctcgccgcgcttcccacaacgagctgcctcacaccgagctctccagccagacgccctacacactcaacttcagcttcgaagagctgaacacgcttggcctggatgaaggtgcccctcgtcacagtaatctaagttggcagtcacaaactcgcagaaccccaagtctttcgagtctcaattcccaggattccagtattgaaatttcaaagcttactgataaggtgcaggccgagtatagagatgcctatagagaatacattgctcagatgtcccagttagaagggggccccgggtctacaaccattagtggcagatcttctccacatagcacatattacatgggtcagagttcatcagggggctctattcattcaaacctagagcaagaaaaggggaaggatagtgaaccaaagcccgatgatgggaggaagtcctttctaatgaagaggggagatgttatcgattattcatcatcaggggtttccaccaacgatgcttcccccctggatcctatcactgaagaagatgaaaaatcagatcagtcaggcagtaagcttctcccaggcaagaaatcttccgaaaggtcaagcctcttccagacagatttgaagcttaagggaagtgggctgcgctatcaaaaactcccaagtgacgaggatgaatctggcacagaagaatcagataacactccactgctcaaagatgacaaagacagaaaagccgaagggaaagtagagagagtgccgaagtctccagaacacagtgctgagccgatcagaaccttcattaaagccaaagagtatttatcggatgcgctccttgacaaaaaggattcatcggattcaggagtgagatccagtgaaagttctcccaatcactctctgcacaatgaagtggcggatgactcccagcttgaaaaggcaaatctcatagagctggaagatgacagtcacagcggaaagcggggaatcccacatagcctgagtggcctgcaagatccaattatagctcggatgtccatttgttcagaagacaagaaaagcccttccgaatgcagcttgatagccagcagccctgaagaaaactggcctgcatgccagaaagcctacaacctgaaccgaactcccagcaccgtgactctgaacaacaatagtgctccagccaacagagccaatcaaaatttcgatgagatggagggaattagggagacttctcaagtcattttgaggcctagttccagtcccaacccaaccactattcagaatgagaatctaaaaagcatgacacataagcgaagccaacgttcaagttacacaaggctctccaaagatcctccggagctccatgcagcagcctcttctgagagcacaggctttggagaagaaagagaaagcattctttga

SEQ ID NO: 305 - DNA, 1713 bp, Homo sapiens
atggcggcgcggcggcgacggagcaccggcggcggcagggcgagagcattaaatgaaagcaaaagagttaataatggcaacacggctccagaagactcttcccctgccaagaaaactcgtagatgccagagacaggagtcgaaaaagatgcctgtggctggaggaaaagctaataaggacaggacagaagacaagcaagatgaatctgtgaaggccttgctgttaaagggcaaagctcctgtggacccagagtgtacagccaaggtggggaaggctcatgtgtattgtgaaggaaatgatgtctatgatgtcatgctaaatcagaccaatctccagttcaacaacaacaagtactatctgattcagctattagaagatgatgcccagaggaacttcagtgtttggatgagatggggccgagttgggaaaatgggacagcacagcctggtggcttgttcaggcaatctcaacaaggccaaggaaatctttcagaagaaattccttgacaaaacgaaaaacaattgggaagatcgagaaaagtttgagaaggtgcctggaaaatatgatatgctacagatggactatgccaccaatactcaggatgaagaggaaacaaagaaagaggaatctcttaaatctcccttgaagccagagtcacagctagatcttcgggtacaggagttaataaagttgatctgtaatgttcaggccatggaagaaatgatgatggaaatgaagtataataccaagaaagccccacttgggaagctgacagtggcacaaatcaaggcaggttaccagtctcttaagaagattgaggattgtattcgggctggccagcatggacgagctctcatggaagcatgcaatgaattctacaccaggattccgcatgactttggactccgtactcctccactaatccggacacagaaggaactgtcagaaaaaatacaattactagaggctttgggagacattgaaattgctattaagctggtgaaaacagagctacaaagcccagaacacccattggaccaacactatagaaacctacattgtgccttgcgcccccttgaccatgaaagttatgagttcaaagtgatttcccagtacctacaatctacccatgctcccacacacagcgactataccatgaccttgctggatttgtttgaagtggagaaggatggtgagaaagaagccttcagagaggaccttcataacaggatgcttctatggcatggttccaggatgagtaactgggtgggaatcttgagccatgggcttcgaattgccccacctgaagctcccatcacaggttacatgtttgggaaaggaatctactttgctgacatgtcttccaagagtgccaattactgctttgcctctcgcctaaagaatacaggactgctgctcttatcagaggtagctctaggtcagtgtaatgaactactagaggccaatcctaaggccgaaggattgcttcaaggtaaacatagcaccaaggggctgggcaagatggctcccagttctgcccacttcgtcaccctgaatgggagtacagtgccattaggaccagcaagtgacacaggaattctgaatccagatggttataccctcaactacaatgaatatattgtatataaccccaaccaggtccgtatgcggtaccttttaaaggttcagtttaatttccttcagctgtggtga

SEQ ID NO: 306 - DNA, 765 bp, Homo sapiens
atggcggaggctgtactgagggtcgcccggcggcagctgagccagcgcggcgggtctggagcccccatcctcctgcggcagatgttcgagcctgtgagctgcaccttcacgtacctgctgggtgacagagagtcccgggaggccgttctgatcgacccagtcctggaaacagcgcctcgggatgcccagctgatcaaggagctggggctgcggctgctctatgctgtgaatacccactgccacgcggaccacattacaggctcggggctgctccgttccctcctccctggctgccagtctgtcatctcccgccttagtggggcccaggctgacttacacattgaggatggagactccatccgcttcgggcgcttcgcgttggagaccagggccagccctggccacaccccaggctgtgtcaccttcgtcctgaatgaccacagcatggccttcactggagatgccctgttgatccgtgggtgtgggcggacagacttccagcaaggctgtgccaagaccttgtaccactcggtccatgaaaagatcttcacacttccaggagactgtctgatctaccctgctcacgattaccatgggttcacagtgtccaccgtggaggaggagaggactctgaaccctcggctcaccctcagctgtgaggagtttgtcaaaatcatgggcaacctgaacttgcctaaacctcagcagatagactttgctgttccagccaacatgcgctgtggggtgcagacacccactgcctga

SEQ ID NO: 307 - DNA, 1239 bp, Homo sapiens
atgcagccctccagccttctgccgctcgccctctgcctgctggctgcacccgcctccgcgctcgtcaggatcccgctgcacaagttcacgtccatccgccggaccatgtcggaggttgggggctctgtggaggacctgattgccaaaggccccgtctcaaagtactcccaggcggtgccagccgtgaccgaggggcccattcccgaggtgctcaagaactacatggacgcccagtactacggggagattggcatcgggacgcccccccagtgcttcacagtcgtcttcgacacgggctcctccaacctgtgggtcccctccatccactgcaaactgctggacatcgcttgctggatccaccacaagtacaacagcgacaagtccagcacctacgtgaagaatggtacctcgtttgacatccactatggctcgggcagcctctccgggtacctgagccaggacactgtgtcggtgccctgccagtcagcgtcgtcagcctctgccctgggcggtgtcaaagtggagaggcaggtctttggggaggccaccaagcagccaggcatcaccttcatcgcagccaagttcgatggcatcctgggcatggcctacccccgcatctccgtcaacaacgtgctgcccgtcttcgacaacctgatgcagcagaagctggtggaccagaacatcttctccttctacctgagcagggacccagatgcgcagcctgggggtgagctgatgctgggtggcacagactccaagtattacaagggttctctgtcctacctgaatgtcacccgcaaggcctactggcaggtccacctggaccaggtggaggtggccagcgggctgaccctgtgcaaggagggctgtgaggccattgtggacacaggcacttccctcatggtgggcccggtggatgaggtgcgcgagctgcagaaggccatcggggccgtgccgctgattcagggcgagtacatgatcccctgtgagaaggtgtccaccctgcccgcgatcacactgaagctgggaggcaaaggctacaagctgtccccagaggactacacgctcaaggtgtcgcaggccgggaagaccctctgcctgagcggcttcatgggcatggacatcccgccacccagcgggccactctggatcctgggcgacgtcttcatcggccgctactacactgtgtttgaccgtgacaacaacagggtgggcttcgccgaggctgcccgcctctag

SEQ ID NO: 308 - DNA, 1926 bp, Homo sapiens
atggccaaagccgcggcgatcggcatcgacctgggcaccacctactcctgcgtgggggtgttccaacacggcaaggtggagatcatcgccaacgaccagggcaaccgcaccacccccagctacgtggccttcacggacaccgagcggctcatcggggatgcggccaagaaccaggtggcgctgaacccgcagaacaccgtgtttgacgcgaagcggctgattggccgcaagttcggcgacccggtggtgcagtcggacatgaagcactggcctttccaggtgatcaacgacggagacaagcccaaggtgcaggtgagctacaagggggagaccaaggcattctaccccgaggagatctcgtccatggtgctgaccaagatgaaggagatcgccgaggcgtacctgggctacccggtgaccaacgcggtgatcaccgtgccggcctacttcaacgactcgcagcgccaggccaccaaggatgcgggtgtgatcgcggggctcaacgtgctgcggatcatcaacgagcccacggccgccgccatcgcctacggcctggacagaacgggcaagggggagcgcaacgtgctcatctttgacctgggcgggggcaccttcgacgtgtccatcctgacgatcgacgacggcatcttcgaggtgaaggccacggccggggacacccacctgggtggggaggactttgacaacaggctggtgaaccacttcgtggaggagttcaagagaaaacacaagaaggacatcagccagaacaagcgagccgtgaggcggctgcgcaccgcctgcgagagggccaagaggaccctgtcgtccagcacccaggccagcctggagatcgactccctgtttgagggcatcgacttctacacgtccatcaccagggcgaggttcgaggagctgtgctccgacctgttccgaagcaccctggagcccgtggagaaggctctgcgcgacgccaagctggacaaggcccagattcacgacctggtcctggtcgggggctccacccgcatccccaaggtgcagaagctgctgcaggacttcttcaacgggcgcgacctgaacaagagcatcaaccccgacgaggctgtggcctacggggcggcggtgcaggcggccatcctgatgggggacaagtccgagaacgtgcaggacctgctgctgctggacgtggctcccctgtcgctggggctggagacggccggaggcgtgatgactgccctgatcaagcgcaactccaccatccccaccaagcagacgcagatcttcaccacctactccgacaaccaacccggggtgctgatccaggtgtacgagggcgagagggccatgacgaaagacaacaatctgttggggcgcttcgagctgagcggcatccctccggcccccaggggcgtgccccagatcgaggtgaccttcgacatcgatgccaacggcatcctgaacgtcacggccacggacaagagcaccggcaaggccaacaagatcaccatcaccaacgacaagggccgcctgagcaaggaggagatcgagcgcatggtgcaggaggcggagaagtacaaagcggaggacgaggtgcagcgcgagagggtgtcagccaagaacgccctggagtcctacgccttcaacatgaagagcgccgtggaggatgaggggctcaagggcaagatcagcgaggcggacaagaagaaggtgctggacaagtgtcaagaggtcatctcgtggctggacgccaacaccttggccgagaaggacgagtttgagcacaagaggaaggagctggagcaggtgtgtaaccccatcatcagcggactgtaccagggtgccggtggtcccgggcctgggggcttcggggctcagggtcccaagggagggtctgggtcaggccccaccattgaggaggtagattag

SEQ ID NO: 309 - DNA, 603 bp, Homo sapiens
atggatgacaaaaagaagaaacggagtcccaagccctgcctggcccagccagcccaggccccaggcacactacggagggtccctgtgcctaccagccacagcggctccttggccctaggacttcctcatctgccatcccccaagcagcgggccaagttcaagagagtaggcaaagagaagtgccgcccagtcctggctggaggtggaagcggctctgcaggcacgcccctgcagcactccttcctgaccgaggtgactgatgtctatgagatggaggggggactcctgaacctgctcaatgatttccactctggccggctgcaggccttcgggaaggaatgctcctttgagcagctggagcacgttcgggagatgcaggagaagctagcccggctgcacttcagcctggatgtgtgtggggaggaggaggacgatgaagaggaagaggatggggtcactgaggggctgccagaggagcagaagaagacaatggctgaccgtaacctggaccagctgcttagcaatctggaagacctcagtaattctatccagaagctgcacctggccgagaacgccgagcctgaggagcagtccgctgcgtag

SEQ ID NO: 310 - DNA, 2202 bp, Homo sapiens
atggacctgagcatgaagaagttcgccgtgcgcaggttcttctctgtgtacctgcgcaggaagtcgcgctccaagagctccagcctgagccggctcgaggaagaaggcgtcgtgaaggagatagacatcagccatcatgtgaaggagggctttgagaaggcagatccttcccagtttgagctgctgaaggttttaggacaaggatcctatggaaaggtgttcctggtgaggaaggtgaaggggtccgacgctgggcagctctacgccatgaaggtccttaagaaagccaccctaaaagttcgggaccgagtgagatcgaagatggagagagacatcttggcagaagtgaatcaccccttcattgtgaagcttcattatgcctttcagacggaaggaaagctctacctgatcctggacttcctgcggggaggggacctcttcacccggctctccaaagaggtcatgttcacggaggaggatgtcaagttctacctggctgagctggccttggctttagaccatctccacagcctggggatcatctacagagatctgaagcctgagaacatcctcctggatgaagaggggcacattaagatcacagatttcggcctgagtaaggaggccattgaccacgacaagagagcgtactccttctgcgggacgatcgagtacatggcgcccgaggtggtgaaccggcgaggacacacgcagagtgccgactggtggtccttcggcgtgctcatgtttgagatgctcacggggtccctgccgttccaggggaaggacaggaaggagaccatggctctcatcctcaaagccaagctggggatgccgcagttcctcagtggggaggcacagagtttgctgcgagctctcttcaaacggaacccctgcaaccggctgggtgctggcattgacggagtggaggaaattaagcgccatcccttctttgtgaccatagactggaacacgctgtaccggaaggagatcaagccaccgttcaaaccagcagtgggcaggcctgaggacaccttccactttgaccccgagttcacagcgcggacgcccacagactctcctggcgtccccccgagtgcaaacgctcatcacctgtttagaggattcagctttgtggcctcaagcctgatccaggagccctcacagcaagatctgcacaaagtcccagttcacccaatcgtgcagcagttacacgggaacaacatccacttcaccgatggctacgagatcaaggaggacatcggggtgggctcctactcagtgtgcaagcgatgtgtgcataaagccacagacaccgagtatgccgtgaagatcattgataagagcaagagagacccctcggaagagattgagatcctcctgcggtacggccagcacccgaacatcatcaccctcaaggatgtctatgatgatggcaagtttgtgtacctggtaatggagctgatgcgtggtggggagctcctggaccgcatcctccggcagagatacttctcggagcgcgaagccagtgacgtcctgtgcaccatcaccaagaccatggactacctccattcccagggggttgttcatcgagacctgaagccgagtaacatcctgtacagggatgagtcggggagcccagaatccatccgagtctgcgacttcggctttgccaagcagctgcgcgcggggaacgggctgctcatgacaccctgctacacggccaatttcgtggccccggaggtcctgaagcgtcaaggctatgatgcggcgtgtgacatctggagtttggggatcctgttgtacaccatgctggcaggatttaccccttttgcaaatgggccagacgatacccctgaggagattctggcgcggatcggcagtgggaagtatgccctttctgggggaaactgggactcgatatctgacgcagctaaagacgtcgtgtccaagatgctccacgtggaccctcatcagcgcctgacggcgatgcaagtgctcaaacacccgtgggtggtcaacagagagtacctgtccccaaaccagctcagccgacaggacgtgcacctggtgaagggcgcgatggccgccacctactttgctctaaacagaacacctcaggccccgcggctggagcccgtgctgtcatccaacctggctcagcgcagaggcatgaagagactcacgtccacgcggctgtag

SEQ ID NO: 311 - DNA, 1563 bp, Homo sapiens
atgcgagtggagagcggttctgcgcaggaaagaggaattttgttggaaagcctgtcgacgttgctagaaaagaccacagcatctcacgaggggcgtgcgccgggaaaccgggagttgacggacctcctgccccccgaggtctgcagtctcctgaacccagcagccatctacgccaacaacgagatcagcctgcgtgacgttgaggtctacggctttgactacgactacaccctggcccagtatgcagacgcactgcaccccgagatcttcagtaccgcccgtgacatcctgatcgagcactacaagtacccagaagggattcggaagtatgactacaaccccagctttgccatccgtggcctccactatgacattcagaagagccttctgatgaagattgacgccttccactacgtgcagctggggacagcctacaggggcctccagcctgtgccagacgaggaggtgattgagctgtatgggggtacccagcacatcccactataccagatgagtggcttctatggcaagggtccctccattaagcagttcatggacatcttctcgctaccggagatggctctgctgtcctgtgtggtggactactttctgggccacagcctggagtttgaccaagcacatctctacaaggacgtgacggacgccatccgagacgtgcatgtgaagggcctcatgtaccagtggatcgagcaggacatggagaagtacatcctgagaggggatgagacgtttgctgtcctgagccgcctggtggcccatgggaaacagctgttcctcatcaccaacagtcctttcagcttcgtagacaaggggatgcggcacatggtgggtcccgattggcgccagctcttcgatgtggtcattgtccaggcagacaagcccagcttcttcactgaccggcgcaagcctttcagaaaactcgatgagaagggctcacttcagtgggaccggatcacccgcttggaaaagggcaagatctatcggcagggaaacctgtttgacttcttacgcttgacggaatggcgtggcccccgcgtgctctacttcggggaccacctctatagtgatctggcggatctcatgctgcggcacggctggcgcacaggcgccatcatccccgagctggagcgtgagatccgcatcatcaacacggagcagtacatgcactcgctgacgtggcagcaggcgctcacggggctgctggagcgcatgcagacctatcaggacgcggagtcgaggcaggtgctggctgcctggatgaaagagcggcaggagctgaggtgcatcaccaaggccctgttcaatgcgcagttcggcagcatcttccgcaccttccacaaccccacctacttctcaaggcgcctcgtgcgcttctctgacctctacatggcctccctcagctgcctgctcaactaccgcgtggacttcaccttctacccacgccgtacgccgctgcagcacgaggcacccctctggatggaccagctctgcaccggctgcatgaagacccccttccttggtgacatggcccacatccgctga

SEQ ID NO: 312 - DNA, 777 bp, Homo sapiens
atggccgcgccggccccgggcctcatctcggtgttctcgagttcccaggagctgggtgcggcgctagcgcagctggtggcccagcgcgcagcatgctgcctggcaggggcccgcgcccgtttcgcgctcggcctgtcgggcgggagcctcgtctcgatgctagcccgcgagctacccgccgccgtcgcccctgccgggccagctagcttagcgcgctggacgctgggcttctgcgacgagcgcctcgtgcccttcgatcacgccgagagcacgtacggcctctaccggacgcatcttctctccagactgccgatcccagaaagccaggtgatcaccattaaccccgagctgcctgtggaggaggcggctgaggactacgccaagaagctgagacaggcattccaaggggactccatcccggttttcgacctgctgatcctgggggtgggccccgatggtcacacctgctcactcttcccagaccaccccctcctacaggagcgggagaagattgtggctcccatcagtgactccccgaagccaccgccacagcgtgtgaccctcacactacctgtcctgaatgcagcacgaactgtcatctttgtggcaactggagaaggcaaggcagctgttctgaagcgcattttggaggaccaggaggaaaacccgctgcccgccgccctggtccagccccacaccgggaaactgtgctggttcttggacgaggcggccgcccgcctcctgaccgtgcccttcgagaagcattccactttgtag

SEQ ID NO: 313 - DNA, 2190 bp, Homo sapiens
atgttttccgccctgaagaagctggtggggtcggaccaggccccgggccgggacaagaacatccccgccgggctgcagtccatgaaccaggcgttgcagaggcgcttcgccaagggggtgcagtacaacatgaagatagtgatccggggagacaggaacacgggcaagacagcgctgtggcaccgcctgcagggccggccgttcgtggaggagtacatccccacacaggagatccaggtcaccagcatccactggagctacaagaccacggatgacatcgtgaaggttgaagtctgggatgtagtagacaaaggaaaatgcaaaaagcgaggcgacggcttaaagatggagaacgacccccaggaggcggagtctgaaatggccctggatgctgagttcctggacgtgtacaagaactgcaacggggtggtcatgatgttcgacattaccaagcagtggaccttcaattacattctccgggagcttccaaaagtgcccacccacgtgccagtgtgcgtgctgggaaactaccgggacatgggcgagcaccgagtcatcctgccggacgacgtgcgtgacttcatcgacaacctggacagacctccaggttcctcctacttccgctatgctgagtcttccatgaagaacagcttcggcctaaagtaccttcataagttcttcaatatcccatttttgcagcttcagagggagacgctgttgcggcagctggagacgaaccagctggacatggacgccacgctggaggagctgtcggtgcagcaggagacggaggaccagaactacggcatcttcctggagatgatggaggctcgcagccgtggccatgcgtccccactggcggccaacgggcagagcccatccccgggctcccagtcaccagtggtgcctgcaggcgctgtgtccacggggagctccagccccggcacaccccagcccgccccacagctgcccctcaatgccgccccaccatcctctgtgccccctgtaccaccctcagaggccctgcccccacctgcgtgcccctcagcccccgccccacggcgcagcatcatctctaggctgtttgggacgtcacctgccaccgaggcagcccctccacctccagagccagtcccggccgcagagggcccagcaacggtccagagtgtggaggactttgttcctgacgaccgcctggaccgcagcttcctggaagacacaacccccgccagggacgagaagaaggtgggggccaaggctgcccagcaggacagcgacagtgatggggaggccctgggcggcaacccgatggtggcagggttccaggacgatgtggacctcgaagaccagccacgtgggagtcccccgctgcctgcaggccccgtccccagtcaagacatcactctttcgagtgaggaggaagcagaagtggcagctcccacaaaaggccctgccccagctccccagcagtgctcagagccagagaccaagtggtcctccataccagcttcgaagccacggagggggacagctcccacgaggaccgcagcacccccctggccaggcggtgtctctgttcgcacaggtccggagaagcgcagcagcaccaggccccctgctgagatggagccggggaagggtgagcaggcctcctcgtcggagagtgaccccgagggacccattgctgcacaaatgctgtccttcgtcatggatgaccccgactttgagagcgagggatcagacacacagcgcagggcggatgactttcccgtgcgagatgacccctccgatgtgactgacgaggatgagggccctgccgagccgcccccaccccccaagctccctctccccgccttcagactgaagaatgactcggacctcttcgggctggggctggaggaggccggacccaaggagagcagtgaggaaggtaaggagggcaaaaccccctctaaggagaagaagaagaagaagaaaaaaggcaaagaggaagaagaaaaagctgccaagaagaagagcaaacacaagaagagcaaggacaaggaggagggcaaggaggagcggcgacggcggcagcagcggcccccgcgcagcagggagaggacggctgccgatgagctggaggctttcctggggggcggggccccgggcggccgccaccctgggggtggcgactacgaggagctctag

SEQ ID NO: 314 - protein, 246 aa, Homo sapiens
  MISC_FEATURE (1)..(246): Xaa can be any naturally occuring amino acid
GNGVAGAGEEDPAAAFLAQQESEIAGIENDEAFAILDGGAPGPQPHGEPPGGPDAVDGVMNGEYYQESNGPTDSYAAISQVXRLQSEPESIRKWREEQMERLEALDANSRKQEAEWXEKAIKELEEWYARQDEXATENKSKQQGSRRXXLMTFDESVPRXXSXERVAXXCELLPPSPSKAGPKXGSPRXCGFXVLPXSPSKAGPPAGGXXVXKPXPLVGKXLXXXXXYSXNXLTRXVKXSXPXALL

SEQ ID NO: 315 - protein, 197 aa, Homo sapiens
  MISC_FEATURE (1)..(197): Xaa can be any naturally occuring amino acid
ALGYHVYPTCRNTSGILGFSVTVGTQATKYNSEVVDKKIEEFLSSFEEKIENLTEEAFNTQVTALIKLKECEDTHLGEEVDRNWNEVVTQQYLFDRLAHEIEALKSFSKSDLVNWFKAHRGPGSKMLSVHVVGYGKYELEEDGTPSSEDSNSSCEVMQLTYLPTSPLLADCIIPITDIRAFTTTLNLLPYHKIVKIX

SEQ ID NO: 316 - protein, 334 aa, Homo sapiens
  MISC_FEATURE (1)..(334): Xaa can be any naturally occuring amino acid
AHASAHASAHASAHASGGLAGCGAPRVNLLGLGEAVWTKQVRSVAMFSEQAAQRAHTLLSPPSANNATFARVPVATYTNSSQPFRLGERSFSRQYAHIYATRLIQMRPFLENRAQQHWGSGVGVKKLCELQPEEKCCVVGTLFKAMPLQPSILREVSEEHNLLPQPPRSKYIHPDDELVLEDELQRIKLKGTIDVSKLVTGTVLAVFGSVRDDGKFLVEDYCFADLAPQKPAPXLDTDRFVLLVSGPGPGWRWKXXPAGHPAAGGCGDGXLGXKGXQCXPAHVSXGYPRWXPPQPQHQXRXFFXXPXPXKKTQQPXGRLFKXWXXSXAXNXXCX

SEQ ID NO: 317 - protein, 398 aa, Homo sapiens
  MISC_FEATURE (1)..(398): Xaa can be any naturally occuring amino acid
GQGIWLDWRAETHLAQPSLLNRSSSPADTATMKERRAPQPVVARCKLVLVGDVQCGKTAMLQVLAKDCYPETYVPTVFENYTACLETEEQRVELSLWDTSGSPYYDNVRPLCYSDSDAVLLCFDISRPETVDSALKKWRTEILDYCPSTRVLLIGCKTDLRTDLSTLMELSHQKQAPISYEQGCAIAKQLGAEIYLEGSAFTSEKSIHSIFRTASMLCLNKPSPLPQKSPVRSLSKRLLHLPSRSELISSTXQEXKRPKSCSIMSGNWRGEDNPPTSSLGVQRXGEXXGXNLRPWTXFQXAPXXAWKETEWGRRKNPGPGMKTPXKKTXXPQXRPILEGGXXPXPPPLQXKKTLGEXGXSGPLGLGXKKPPFXFCLSXXFPXXXGKEGXXPXLPLXXP

SEQ ID NO: 318 - protein, 364 aa, Homo sapiens
  MISC_FEATURE (1)..(364): Xaa can be any naturally occuring amino acid
GLLASGGGTADRCIRFWNTLTGQPLQCIDTGSQVCNLAWSKHANELVSTHGYSQNQILVWKYPSLTQVAKLTGHSYRVLYLAMSPDGEAIVTGAGDETLRFWNVFSKTRSTKESVSVLNLFTRIRTCRAGPCHTSCPESEDPSSSACMDSAFPALVPRGRRLGGRGAGPGGSWSLIKCLIVNHVHQYLGWARGRGPSAAGALSPFPKGENHIGRSRLXPSVLRATDAPWDPHCLRLFITCPPEPHALXGTAHVCTEXNHXTPGLIGGGLKPRLPIHGCTPPCQTQNQPXGQTKAXRPGQVARXPGRNQPXDPXXVPTWVFXDSXXPLWFXXSKKXXFWKNLFXGPSPXGQXXLKXAXXXWPXVX

SEQ ID NO: 319 - protein, 306 aa, Homo sapiens
  MISC_FEATURE (1)..(306): Xaa can be any naturally occuring amino acid
GRPPDAPSMREIVHIQAGQCGNQIGAKFWEVISDEHGIDPSGNYVGDSDLQLERISVYYNEASSHKYVPRAILVDLEPGTMDSVRSGAFGHLFRPDNFIFGQSGAGNNWAKGHYTEGAELVDSVLDVVRKECENCDCLQGFQLTHSLGGGTGSGMGTLLISKVREEYPDRIMNTFSVVPSPKVSDTVVEPYNATLSIHQLVENTDETYCIDNEALYDICFRTLKLATPTYGDLNHLVSATMSGVTTSLRFPGQLNADLRKLAVNMVPXPAPALLXAPGFAPPHSPGAAXXLPGPPGPELXPXXMFX

SEQ ID NO: 320 - protein, 334 aa, Homo sapiens
  MISC_FEATURE (1)..(334): Xaa can be any naturally occuring amino acid
VKATDQEKSRKLHELTVMQDRREQARQDLKGLEETVAKELQTLHNLRKLFVQDLATRVKKSAEIDSDDTGGSAAQKQKISFLENNLEQLTKVHKQLVRDNADLRCELPKLEKRLRATAERVKALESALKEAKENASRDRKRYQQEVDRIKEAVRSKNMARRGHSAQIAKPIRPGQHPAASPTHPSAIRGGGAFVQNSQPVAVRGGGGKQVSFIHTHRCKVIEVRRGHGIKQSFNDYNLYSLGIVELLLKKMYXLYLACTAVSYLLFLTLLLPNTTRVHFGILGGKRTVYNXGPIYYPVXXSGLNLXLXXXLLXLKDGLLDFXEVIFNPXXYXPX

SEQ ID NO: 321 - protein, 360 aa, Homo sapiens
  MISC_FEATURE (1)..(360)
  MISC_FEATURE (1)..(360): Xaa can be any naturally occuring amino acid
AASLRELPTDGAPPPPPGRPPAAAMPFSNSHNALKLRFPAEDEFPDLSAHNNHMAKVLTPELYAELRAKSTPSGFTLDDVIQTGVDNPGHPYIMTVGCVAGDEESYEVFKDLFDPIIEDRHGGYKPSDEHKTDLNPDNLQGGDDLDPNYVLSSRVRTGRSIRGFCLPPHCSRGERRAIEKLAVEALSSLDGDLAGRYYALKSMTEAEQQQLIDDHFLFDKPVSPLLLASGMARDWPDARGIWHNDNKTFLVWVNEEDHLRVISMQKGGNMKEVXTRXCTGLXXIETLFKSKXYXFXWXXHLGXXLTCPSNWXXGXGRCAYKLPNWXXMKILXVXXXXXFXNXXRGXGXXXGGGVXKXQSX

SEQ ID NO: 322 - protein, 367 aa, Homo sapiens
  MISC_FEATURE (1)..(367): Xaa can be any naturally occuring amino acid
ANLKTHIKSKHGNNLPYKCEHCPQAFGDERELQRHLDLFQGHKTHQCPHCDHKSTNSSDLKRHIISVHTKDFPHKCEVCDKGFHRPSELKKHSDIHKGRKIHQCRHCDFKTSDPFILSGHILSVHTKDQPLKCKRCKRGFRQQNELKKHMKTHTGRKIYQCEYCEYSTTDASGFKRHVISIHTKDYPHRCEFCKKGFRRPSEKNQHIMRHHKEALMDQYKERSYLGDMICYLGENSHLSHRVSKLDTKPLYILCIKDLKIFEFTGDPIAXKLLRIEALNGYXKTFLSIXXKVLYAYXTSEGKAKTKLFLGYVXXKXFEXXKXLXXGGLAXAXQTPFXQFXXGXGKKXGPSXPLXLXXXXGXXINSXX

SEQ ID NO: 323 - protein, 326 aa, Homo sapiens
  MISC_FEATURE (1)..(326): Xaa can be any naturally occuring amino acid
ADAWADAWVKSACKEDIPSEKSEEITTGSAWFSFLESHNKLDKDNLSYIEHIFEISRRPDLLTMVVDYRTRVLKISEEDELDTKLTRIPSAKKYKDIIRQPSEEEIIKLAPPPKKAARGRKRRKVGPSSDHSLPPSSRRGGKGNPPSTHLLTWSPPYCARVCACAHALAVCLYVLIFLFLRGWGSGARGGGVSPLEEVGAISMQIEISTFLLLPFPPLPPYLSVEAXRTCIFLHGADIGVRYGRGRWIQGKSXGDGXLFQKTLNSHAVSXTIXTKFSELLXWGSKLWEGKAXXLEKXKNXXGLXXXLKXLXXPXXXCPXGXXXKXX

SEQ ID NO: 324 - protein, 286 aa, Homo sapiens
  MISC_FEATURE (1)..(286): Xaa can be any naturally occuring amino acid
DDSQLEKANLIELEDDSHSGKRGIPHSLSGLQDPIIARMSICSEDKKSPSECSLIASSPEENWPACQKAYNLNRTPSTVTLNNNSAPANRANQNFDEMEGIRETSQVILRPSSSPNPTTIQNENLKSMTHKRSQRSSYTRLSKDPPELHAAASSESTGFGEERESILEKQAKEKSVTVPLQNCPGFLHPRPSPFYILLTDNPMMRPRKRHLQCDRREHEKHGSPASLCGLCNKLQNSLILLYLSLAHYPIKLFETRDLSIKIGQKYFKGLNVPKEKKLETLFANIX

SEQ ID NO: 325 - protein, 236 aa, Homo sapiens
  MISC_FEATURE (1)..(236): Xaa can be any naturally occuring amino acid
ADAWEVISQYLQSTHAPTHSDYTMTLLDLFEVEKDGEKEAFREDLHNRMLLWHGSRMSNWVGILSHGLRIAPPEAPITGYMFGKGIYFADMSSKSANYCFASRLKNTGLLLLSEVALGQCNELLEANPKAEGLLQGKHSTKGLGKMAPSSAHFVTLNGSTVPLGPASDTGILNPDGYTLNYNEYIVYNPNQVRMRYLLKVQFNFLQLWMLILNKPEISSSKKISSVVLVNFVIFYX

SEQ ID NO: 326 - protein, 267 aa, Homo sapiens
  MISC_FEATURE (1)..(267): * can be any naturally occuring amino acid or a gap
  MISC_FEATURE (1)..(267): Xaa can be any naturally occuring amino acid
AILLRQMFEPVSCTFTYLLGDRESREAVLIDPVLETAPRDAQLIKELGLRLLYAVNTHCHADHITGSGLLRSLLPGCQSVISRLSGAQADLHIEDGDSIRFGRFALETRASPGHTPGCVTFVLNDRSMAFTGDALLIRGCGRTDFQQGCAKTLYHSVHEKIFTLPGDCLIYPAHDYHGFTVSTVEEERTLNPRLTLSCEEFVKIMGNLNLPKPQQIDFAVPANMRCGVQTPTASHFCQMLPSTINALGGRRGRQHCTSPFPPHSLSX

SEQ ID NO: 327 - protein, 321 aa, Homo sapiens
  MISC_FEATURE (1)..(321): Xaa can be any naturally occuring amino acid
AHASADAWVQPSSLLPLALCLLAAPASALVRIPLHKFTSIRRTMSEVGGSVEDLIAKGPVSKYSQAVPAVTEGPIPEVLKNYMDAQYYGEIGIGTPPQCFTVVFDTGSSNLWVPSIHCKLLDIACWIHHKYNSDKSSTYVKNGTSFDIHYGSGSLSGYLSQDTVSVPCQSASSASALGGVKVERQVFGEATKQPGITFIAAKFDGILGMAYPRISVNNVLPVFDNLMXXKLVDXNIFSFYLSRDPXAXPGGXLMLGGTXSKYYKGSLSYLNVTRKAXWXGPPGPXGRWPXGXTCXRRVXRPLXKXXTFXXGGPXGXKXXXX

SEQ ID NO: 328 - protein, 174 aa, Homo sapiens [sequence omitted]

SEQ ID NO: 329 - protein, 270 aa, Homo sapiens
  MISC_FEATURE (1)..(270): Xaa can be any naturally occuring amino acid
GNLHRSITRDPKPPGLRPSQRPMDDKKKKRSPKPCLAQPAQAPGTLRRVPVPTSHSGSLALGLPHLPSPKQRAKFKRVGKEKCRPVLAGGGSGSAGTPLQHSFLTEVTDVYEMEGGLLNLLNDFHSGRLQAFGKECSFEQLEHVREMQEKLARLHFSLDVCGEEEDDEEEEDGVTEGLPEEQKKTMADRNLDQLLSNLEDLSNSIQKLHLAENAEPEEQSAAASHAGPHCPSHSLQTVTFLXTRAGVLRXPRCYGGRGALNGIKTXKEKX

SEQ ID NO: 330 - protein, 349 aa, Homo sapiens
  MISC_FEATURE (1)..(349): Xaa can be any naturally occuring amino acid
  MISC_FEATURE (1)..(349): * can be any naturally occuring amino acid or a gap
VKRQGYDAACDIWSLGILLYTMLAGFTPFANGPDDTPEEILARIGSGKYALSGGNWDSISDAAKDVVSKMLHVDPHQRLTAMQVLKHPWVVNREYLSPNQLSRQDVHLVKGAMAATYFALNRTPQAPRLEPVLSSNLAQRRGMKRLTSTRLRVGPWPQRPLPASSWAHRPRPRSPSGTQSDHKSSREAAPALAVSVFSFSAPERVLTWGLLQASLRQPPRPLSFLPSKTKCAPSPRVPVRGRGLLSXPAGPLIHGFXFLPKXLFSNYEXGRFGQTPXTHXPXTRWXXGXAXAXPLVGCRXXXAGVTWHPGXPXAXXXVGTXASXRNAXXXPKNXKTXSPPLXFCRXXGX

SEQ ID NO: 331 - protein, 405 aa, Homo sapiens
  MISC_FEATURE (1)..(405): Xaa can be any naturally occuring amino acid
GGRRAGRGQRGRASSSPSCPGCGPPGPGAHCPGVPRSAPAQAPTSGADLSAHLWARYQDMRRLVHDLLPPEVCSLLNPAAIYANNEISLRDVEVYGFDYDYTLAQYADALHPEIFSTARDILIEHYKYPEGIRKYDYNPSFAIRGLHYDIQKSLLMKIDAFHYVQLGTAYRGLQPVPDEEVIELYGGTQHIPLYQMSGFYGKGPSIKQFMDIFSLPEMALLSCVVDYFLGHSLEFDQAHLYKDVTDAIRDVHVKGLMYQWIEQDMXXYIXXGDETFAVLXRLVAHGKXAVPHXQKVXLXFVXKGNAGNGGFRFGPSXXNVVIVKAKXPXFXSLTGEAFKIXKGFXXXGTXXPLGKXEXXLXGKTVLIXXLRKGGXPRXFFWENXFYXLGXFFXGRXGKXLXXXGG

SEQ ID NO: 332 - protein, 334 aa, Homo sapiens
  MISC_FEATURE (1)..(334): Xaa can be any naturally occuring amino acid
AALAMAAPAPGLISVFSSSQELGAALAQLVAQRAACCLAGARARFALGLSGGSLVSMLARELPAAVAPAGPASLARWTLGFCDERLVPFDHAESTYGLYRTHLLSRLPIPESQVITINPELPVEEAAEDYAKKLRQAFQGDSIPVFDLLILGVGPDGHTCSLFPDHPLLQEREKIVAPISDSPKPPPQRVTLTLPVLNAARTVIFVATGEGKAAVLKRILEDQXENPLPAALVQPHTGKLCWFLDXAAAPYSESYXLTXLGLLLINPVMTSKLHLDLFKNARXAXGRFFIGXNPSXLGXIFXXLXEXKNGKKKXPGKNHXXKXSXXXXKKNFEX

SEQ ID NO: 333 - protein, 284 aa, Homo sapiens
  MISC_FEATURE (1)..(284): Xaa can be any naturally occuring amino acid
ALLRQLETNQLDMDATLEELSVQQETEDQNYGIFLEMMEARSRGHASPLAANGQSPSPGSQSPVVPAGAVSTGSSSPGTPQPAPQLPLNAAPPSSVPPVPPSEALPPPACPSAPAPRRSIISRLFGTSPATEAAPPPPEPVPAAQGPATVQSVEDFVPDDRLDRSFLEDTTPARDXKKVGAKAAXQDSDSDGXALGGNPMVAGFQDDVDLXNXPRGXPPLPCRPRPNSXXXSFXVRXKQKXAXPXKGLAPTPQXCXKXKXQXVLHTTFKXXKGEXXPXXNXXPP

1.-15. (canceled)

16. A method for identifying marker sequences for rheumatoid arthritis (RA) comprising the steps of:
a) selecting marker sequence candidates by screening protein biochips representing a cDNA expression library with at least 10 patient samples and at least 10 samples of healthy individuals, wherein each sample is measured individually and marker sequence candidates for RA are selected by a comparison of the results of the screens obtained with the RA patient samples and the results of the screens obtained with the samples from healthy individuals,
b) producing the proteins and/or partial proteins (peptides) coded by the marker sequence candidates by expression of the cDNA of the marker sequence candidates,
c) producing beads to which one or more of the proteins and/or partial proteins (peptides) produced in step b) are coupled,
d) validating the marker sequence candidates coupled to the beads by means of samples from patients with RA and samples from healthy individuals in that marker sequences for RA demonstrate an interaction with the samples from patients with RA and demonstrate a comparatively lower or no interaction with the samples from healthy individuals, wherein the marker sequences SEQ ID No. 1 to 182, SEQ ID. No. 183 to 273, SEQ ID No. 274 to 313 and SEQ ID No. 314 to SEQ ID No. 333 are obtained.

17. The method according to claim 16, wherein an interaction between marker sequence candidate and the samples in method step d) is detected by means of a fluorescence signal, wherein the intensity of the fluorescence signal correlates with the intensity of the interaction.

18. The method according to claim 16, characterised in that steps c) and d) are performed in the presence of CCP (cytochrome c peroxidase), wherein the marker sequences SEQ ID No. 29 to 79, SEQ ID No. 120 to 170, SEQ ID No. 211 to 261, SEQ ID No. 274, SEQ ID No. 276, SEQ ID No. 278, SEQ ID No. 285 to 288, SEQ ID No. 291, SEQ ID No. 294, SEQ ID No. 296, SEQ ID No. 298, SEQ ID No. 305 to 308, SEQ ID No. 311, SEQ ID No. 314, SEQ ID No. 316, SEQ ID No. 318, SEQ ID No. 325 to 328, and SEQ ID No. 331 are obtained.

19. A marker sequence for rheumatoid arthritis obtainable by a method according to one of claim 16, wherein the marker sequence is selected from the group of sequences SEQ ID No. 1 to 182 and SEQ ID. No. 274 to 313, a sequence homologous to the sequences SEQ ID No. 1 to 182 or SEQ ID No. 274 to 313 or a partial sequence of SEQ ID No. 1 to 182 or SEQ ID. No. 274 to 313 or a protein coded by SEQ ID No. 1 to 182 or SEQ ID. No. 274 to 313 or a protein coded by a partial sequence of SEQ ID No. 1 to 182 or SEQ ID. No. 274 to 313 or a protein coded by a homologous sequence of SEQ ID No. 1 to 182 or SEQ ID. No. 274 to 313 or a genomic sequence comprising one of the sequences SEQ ID No. 1 to 182 or SEQ ID. No. 274 to 313.

20. A marker sequence for rheumatoid arthritis obtainable by a method according to claim 18, wherein the marker sequence is selected from the group of sequences SEQ ID No. 29 to 79, SEQ ID No. 274, SEQ ID No. 276, SEQ ID No. 278, SEQ ID No. 285 to 288, SEQ ID No. 291 or SEQ ID. No. 120 to 170, SEQ ID No. 294, SEQ ID No. 296, SEQ ID No. 298, SEQ ID No. 305 to 308, SEQ ID No. 311, a sequence homologous to the sequences SEQ ID No. 29 to 79, SEQ ID No. 274, SEQ ID No. 276, SEQ ID No. 278, SEQ ID No. 285 to 288, SEQ ID No. 291 or SEQ ID No. 120 to 170, SEQ ID No. 294, SEQ ID No. 296, SEQ ID No. 298, SEQ ID No. 305 to 308, SEQ ID No. 311 or a partial sequence of SEQ ID No. 29 to 79, SEQ ID No. 274, SEQ ID No. 276, SEQ ID No. 278, SEQ ID No. 285 to 288, SEQ ID No. 291 or SEQ ID. No. 120 to 170, SEQ ID No. 294, SEQ ID No. 296, SEQ ID No. 298, SEQ ID No. 305 to 308, SEQ ID No. 311 or a protein coded by SEQ ID No. 29 to 79, SEQ ID No. 274, SEQ ID No. 276, SEQ ID No. 278, SEQ ID No. 285 to 288, SEQ ID No. 291 or SEQ ID. No. 120 to 170, SEQ ID No. 294, SEQ ID No. 296, SEQ ID No. 298, SEQ ID No. 305 to 308, SEQ ID No. 311 or a protein coded by a partial sequence of SEQ ID No. 29 to 79, SEQ ID No. 274, SEQ ID No. 276, SEQ ID No. 278, SEQ ID No. 285 to 288, SEQ ID No. 291 or SEQ ID. No. 120 to 170, SEQ ID No. 294, SEQ ID No. 296, SEQ ID No. 298, SEQ ID No. 305 to 308, SEQ ID No. 311 or a protein coded by a homologous sequence of SEQ ID No. 29 to 79, SEQ ID No. 274, SEQ ID No. 276, SEQ ID No. 278, SEQ ID No. 285 to 288, SEQ ID No. 291 or SEQ ID. No. 120 to 170, SEQ ID No. 294, SEQ ID No. 296, SEQ ID No. 298, SEQ ID No. 305 to 308, SEQ ID No. 311 or a genomic sequence comprising one of the sequences SEQ ID No. 29 to 79, SEQ ID No. 274, SEQ ID No. 276, SEQ ID No. 278, SEQ ID No. 285 to 288, SEQ ID No. 291 or SEQ ID. No. 120 to 170, SEQ ID No. 294, SEQ ID No. 296, SEQ ID No. 298, SEQ ID No. 305 to 308, or SEQ ID No. 311.

21. Use of one or more marker sequence(s) according to claim 19 for the diagnosis of rheumatoid arthritis, wherein the marker sequence(s) is/are determined on or from a patient to be examined.

22. The use according to claim 21, characterised in that 2 or 3, preferably 4 or 5, particularly preferably 6, 7 or 8 or more different marker sequences, for example 10 to 20 or 30 or more different marker sequences are determined on or from a patient to be examined.

23. The use according to one of claim 21, characterised in that the marker sequence(s) is/are applied to a solid support, wherein the solid support is selected from filters, membranes, wafers, for example silicon wafers, glass, metal, plastic, chips, mass spectrometry targets, matrices, and beads, for example magnetic, coated or labelled beads, such as fluorophore-labelled beads or Luminex beads.

24. A method for diagnosing rheumatoid arthritis, wherein
a.) at least one marker sequence according to claim 19 is applied to a solid support, preferably to a bead, and
b.) is brought into contact with bodily fluid or tissue sample of a patient and
c.) an interaction of the bodily fluid or of the tissue sample with the marker sequence from a.) is detected.

25. A method for stratification, in particular for risk stratification, or for therapy management of a patient with rheumatoid arthritis, wherein at least one marker sequence according to claim 19 is used in order to examine a sample from the patient.

26. An arrangement comprising one or more marker sequence(s) according to claim 19.

27. An assay or protein array comprising an arrangement according to claim 26.

28. Use of an arrangement according to claim 26 for identifying and/or characterising a substance for rheumatoid arthritis containing means for detecting binding success, characterised in that an arrangement or an assay or protein array is brought into contact with a.) at least one substance to be examined and b.) binding success is detected.

29. Use of a protein array according to claim 27 for identifying and/or characterising a substance for rheumatoid arthritis containing means for detecting binding success, characterised in that an arrangement or an assay or protein array is brought into contact with a.) at least one substance to be examined and b.) binding success is detected.

30. A diagnostic agent for the diagnosis of rheumatoid arthritis containing at least one marker sequence according to claim 19 and where appropriate further auxiliaries and additives.

31. Use of at least one marker sequence selected from the marker sequences according to claim 20 for identifying a sub-group of patients within the group of patients with rheumatoid arthritis, wherein the patients in the sub-group cannot be identified by means of the marker CCP.
